(19) United States
(12) Patent Application Publication
(10) Pub. No.: US 2026/0109748 A1
(43) Pub. Date: Apr. 23, 2026

(54) MODULATION OF DENDRITIC CELL LINEAGES

(71) Applicants: Orionis Biosciences, Inc., Waltham, MA (US); Orionis Biosciences BV, Ghent (BE); VIB VZW, Gent (BE); Universiteit Gent, Gent (BE)

(72) Inventors: Nikolai KLEY, Waltham, MA (US); Jan TAVERNIER, Balegem (BE); Anje CAUWELS, Merelbeke (BE); Lennart ZABEAU, Zwijnaarde (BE); Erik DEPLA, Zwijnaarde (BE)

(21) Appl. No.: 19/298,570

(22) Filed: Aug. 13, 2025

Related U.S. Application Data
(63) Continuation of application No. 17/292,017, now Pat. No. 12,410,225.
(60) Provisional application No. 62/757,643, filed on Nov. 8, 2018.

(51) Int. Cl. C07K 14/56; A61K 38/00; A61K 39/00; A61P 35/00; C07K 14/565; C07K 16/28

(52) U.S. Cl. CPC C07K 14/56; A61P 35/00; C07K 14/565; C07K 16/2815; C07K 16/2818; C07K 16/2827; C07K 16/2851; C07K 16/2896; A61K 38/00; A61K 2039/505; C07K 2317/22; C07K 2317/31; C07K 2317/569; C07K 2317/71; C07K 2317/73; C07K 2317/76; C07K 2319/30; C07K 2319/33; C07K 2319/74

(57) ABSTRACT

The present invention relates, in part, to agents, chimeric proteins and chimeric protein complexes that bind a plasmacytoid dendritic cell (pDC), e.g. Clec4C and their use as diagnostic and therapeutic agents. The present Invention further relates to pharmaceutical compositions comprising the pDC, e.g. Clec4C, binding agents, chimeric proteins, or chimeric protein complexes and their use in the treatment of various diseases, including autoimmune diseases.

### CROSS-REFERENCE TO RELATED APPLICATIONS

[0001] This application is a continuation of U.S. application Ser. No. 17/292,017, filed May 7, 2021 (now U.S. Pat. No. 12,410,225), which is a national stage entry of PCT/US19/60291, filed Nov. 7, 2019, which claims the benefit of U.S. Provisional Patent Application No. 62/757,643, filed Nov. 8, 2018, the entire contents of which are hereby incorporated by reference in their entirety.

### FIELD

[0002] The present invention relates, in part, to targeting moieties that recognize and bind Clec4C and their use as diagnostic and therapeutic agents. The present invention further relates to chimeric proteins, chimeric protein complexes, and pharmaceutical compositions comprising chimeric proteins and chimeric protein complexes having a plasmacytoid dendritic cell (pDC) targeting moiety, e.g. Clec4C, and their use in the treatment of various diseases, including autoimmunity.

### Sequence Listing

[0003] The contents of the computer readable Sequence Listing in XML format (“XML Document”) submitted electronically herewith are incorporated herein by reference in their entirety. A computer readable format copy of the Sequence Listing (filename: ORN-051C1_114384-5051.xml, date produced: Aug. 13, 2025; size: 1,888,659 bytes) is submitted per 37 C.F.R. §§ 1.831-1.835.

### BACKGROUND

[0004] Dendritic cells (DCs) are antigen-presenting cells (APCs) that process antigens and display them to other cells of the immune system. Specifically, dendritic cells are capable of capturing and presenting antigens on their surfaces to regulate the function of T cells such as CD4+ helper T cells, CD8+ cytotoxic T cells (CTLs) and regulatory T cells (Tregs). Further, activated dendritic cells are capable of recruiting additional immune cells such as macrophages, eosinophils, natural killer cells, and natural killer T cells.

[0005] Given the important role of dendritic cells in immunity, derailed dendritic cell functions have been implicated in diseases such as cancer and autoimmune diseases such as multiple sclerosis. For example, cancer cells may evade immune detection and destruction by crippling dendritic cell functionality through prevention of dendritic cell recruitment, activation and function. In addition, dendritic cells have been found in the brain during central nervous system inflammation and may be involved in the pathogenesis of autoimmune diseases in the brain.

[0006] Dendritic cell subtypes or lineages include conventional dendritic cell (CDC), which include cDC-1, which is a major stimulator of T cells and cDC-2, which may have a function in fighting infection. Without wishing to be bound by theory, cDCs are characterized by interleukin 12 (IL-12) secretion and TLR 2/TLR 4 expression. A further dendritic cell subtype or lineage are plasmacytoid dendritic cells (pDCs). Without wishing to be bound by theory, pDCs can produce high amounts of interferon-alpha and are characterized by TLR 7/TLR 9 expression. pDC and cDC modulate differing but complex aspects of the immune system.

[0007] Accordingly, there remains a need for improved therapies for diseases including cancer and autoimmune diseases such as multiple sclerosis by modifying dendritic cell functions, including modifying specific DC subtypes or lineages.

### SUMMARY

[0008] In various aspects, the present invention relates to pDC, e.g. Clec4C as a pDC cell surface marker, binding agents having at least one targeting moiety that specifically binds to a pDC, e.g. via Clec4C. In various embodiments, these binding agents bind to, but do not functionally modulate (e.g. partially or fully neutralize) the pDC marker, e.g. Clec4C. Therefore, in various embodiments, the present pDC marker, e.g. Clec4C, binding agents have use in, for instance, directly or indirectly recruiting a pDC, e.g. a Clec4C-expressing, cell to a site of interest while still allowing the pDC, e.g. Clec4C-expressing, cell to signal via pDC marker, e.g. Clec4C (e.g. the binding of the Clec4C binding agent does not reduce or eliminate Clec4C signaling at the site of interest). In an embodiment, the targeting moiety is a single domain antibody (VHH).

[0009] In various embodiments, the pDC marker binding agent further comprises a signaling agent, e.g., without limitation, an interferon, an interleukin, a chemokine and a tumor necrosis factor, that may be modified to attenuate activity. In various embodiments, the pDC marker binding agent comprises additional targeting moieties that bind to other targets (e.g. antigens, receptor) of interest. In an embodiment, the other targets (e.g. antigens, receptor) of interest are present on tumor cells. In another embodiment, the other targets (e.g. antigens, receptor) of interest are present on immune cells. In some embodiments, the present pDC marker binding agent may directly or indirectly recruit an immune cell (e.g. a dendritic cell) to a site of action (such as, by way of non-limiting example, the tumor microenvironment). In some embodiments, the present pDC marker binding agent facilitates the presentation of antigens (e.g., tumor antigens) by dendritic cells. In an embodiment, the other targets (e.g. antigens, receptor) of interest are present on cells, tissues, and organ sites affected by autoimmune disease. In some embodiments, the present pDC marker binding agent may directly or indirectly recruit an immune cell (e.g. a dendritic cell) to a site of action (such as, by way of non-limiting example, cells, tissues, and organ sites affected by autoimmune disease).

[0010] In various embodiments, the Clec4C binding agent further comprises a signaling agent, e.g., without limitation, an interferon, an interleukin, a chemokine and a tumor necrosis factor, that may be modified to attenuate activity. In various embodiments, the Clec4C binding agent comprises additional targeting moieties that bind to other targets (e.g. antigens, receptor) of interest. In an embodiment, the other targets (e.g. antigens, receptor) of interest are present on tumor cells. In another embodiment, the other targets (e.g. antigens, receptor) of interest are present on immune cells. In some embodiments, the present Clec4C binding agent may directly or indirectly recruit an immune cell (e.g. a dendritic cell) to a site of action (such as, by way of non-limiting example, the tumor microenvironment). In some embodiments, the present Clec4C binding agent facilitates the presentation of antigens (e.g., tumor antigens) by dendritic cells. In an embodiment, the other targets (e.g. antigens, receptor) of interest are present on cells, tissues, and organ sites affected by autoimmune disease. In some embodiments, the present pDC marker binding agent may directly or indirectly recruit an immune cell (e.g. a dendritic cell) to a site of action (such as, by way of non-limiting example, cells, tissues, and organ sites affected by autoimmune disease).

[0011] The present technology also provides fragment crystallizable region (Fc)-based chimeric protein complexes in which most, if not all, of the above outlined requirements are met. These constructs encode biological therapeutic agents whose effector function can be delivered in a highly precise fashion to a target of choice and without, or with a mitigated amount of systemic adverse events, thereby limiting systemic cross-reactivities and associated adverse events, while also providing features that impart pharmaceutical properties enabling the production of therapeutic agents with, for example, desired in vivo exposure time (e.g. half-life), size (e.g. for biodistribution and clearance characteristics), as well as large scale production and/or purification for commercial production (e.g. having adequate solubility, purity, stability and storage properties).

[0012] In some aspects, the present technology relates to Fc-based chimeric protein complexes including i) a targeting moiety that comprises a recognition domain which recognizes and/or binds to a pDC, e.g. via Clec4C, or a Clec4C binding agent as disclosed above. The Fc-based chimeric protein complexes may further include a wild type or modified signaling agent, wherein the modified signaling agent has one or more mutations that confer improved safety relative to a wild type signaling agent, and an Fc domain, having one or more Fc chains.

[0013] In some embodiments, the Fc domain has one or more mutations that reduce or eliminate an effector function of the Fc domain, promote Fc chain pairing of the Fc domain, and/or stabilize a hinge region in the Fc domain. In some embodiments, the one or more Fc chains of the Fc domain have one or more mutations that reduce or eliminate an effector function of the Fc domain, promote Fc chain pairing of the Fc domain, and/or stabilize a hinge region in the Fc domain.

[0014] In some embodiments, such Fc-based chimeric protein complexes are heterodimeric. In some embodiments, the Fc-based chimeric protein complexes are heterodimeric and the targeting moiety and the signaling agent are oriented in trans. In some embodiments, the Fc-based chimeric protein complexes are heterodimeric and pairing is via Ridgway knob-in-hole construction (as described herein). In some embodiments, the Fc-based chimeric protein complexes are heterodimeric and pairing is via Merchant knob-in-hole construction (as described herein). In some embodiments, such Fc-based chimeric protein complexes are homodimeric.

[0015] In some embodiments, the one or more mutations in the modified signaling agent reduces the affinity or activity at the signaling agent's receptor relative to a wild type signaling agent. In some embodiments, the targeting moiety restores the affinity or activity of the modified signaling agent.

[0016] In some embodiments, the Fc-based chimeric protein complexes comprise one or more additional targeting moieties and/or wild type or modified signaling agents. In some embodiments, the Fc-based chimeric protein complexes are multispecific. In some embodiments, the targeting moieties are a single domain antibody (VHH).

[0017] In another aspect, the present technology relates to the use of Fc-based chimeric protein complexes to treat or prevent various diseases and disorders. In some embodiments, the Fc-based chimeric protein complexes are used to treat cancer, infections, metabolic diseases, (neuro) degenerative diseases, and cardiovascular diseases and immune disorders.

[0018] In various embodiments, the present pDC marker binding agents find use in the treatment of various diseases or disorders such as autoimmune diseases, cancer, infections, immune disorders, and other diseases and disorders, and the present invention encompasses various methods of treatment.

[0019] In various embodiments, the present Clec4C binding agents find use in the treatment of various diseases or disorders such as autoimmune diseases, cancer, infections, immune disorders, and other diseases and disorders, and the present invention encompasses various methods of treatment.

### BRIEF DESCRIPTION OF DRAWINGS

[0020] FIGS. 1A-I show that WT mIFNα protects dose-dependently, but is associated with severe toxicity. Mice were immunized on d0, and treated d7-25 with 5000 or 10⁶ IU mIFNα daily. Clinical score (A) and body weights (B) were determined daily. High dose mIFNα caused mortality (C) and severe haematological deficits (D-I). Shown is a representative experiment (n=5). Differences were assessed using two-way ANOVA followed by Dunnett's multiple-comparison test; * P<0.05, ** P<0.01, *** P<0.001 compared with PBS treated animals.

[0021] FIGS. 2A-L depict Clec9A-AFN, but not CD8-AFN, as efficiently protecting against disease without toxicity. Shown are clinical scores (A), % of diseased (B) or paralyzed (C) mice, body weight (D), mortality (E), haematological parameters (F-H). (A-C) Shown are pooled data from 3 experiments (n=15-18), (D-H) shown is a representative experiment (n=5). Clec9A-AFN protection is long lasting (I), effective if started after disease onset (J), reversed by anti-PDL1 or anti-CTLA4 (K), and better than XCL1-AFN treatment (L). (I-L) Shown is a representative experiment (n=6). The black horizontal arrow indicates the treatment period. Differences were assessed using two-way ANOVA followed by Dunnett's multiple-comparison test; * P<0.05, **** P<0.0001 compared with PBS treated animals. In panels F, G, and H, the order of histograms left to right is PBS, Clec9A-AFN, and CD8-AFN.

[0022] FIGS. 3A-L depict pDC targeting inhibiting disease development. Clec9A-AFN protects in Batf3-(A-C), and in (partially) pDC-depleted mice (D, E). Shown are the clinical scores, n=5 (A, D, E) and spinal cord analysis, n=3 (B,C) to evaluate demyelination (LFB), axonal damage (APP), B cells (B220), macrophages (Mac) and T cells (CD3). However, EAE in Batf3^{-/-} causes compensatory cDC1 development (F, n=4), and pDC depletion in LNs is not evident in case of Clec9A-AFN therapy (G) or in spleens (H), n=3. (G,H) Plus and minus signs under the X axis indicate pDC depletion treatments (+) or not (−). CD11c-IFNAR1^{-/-} are still protected by Clec9A-AFN (I). Selective pDC targeting with SiglecH-AFN is as effective as Clec9A-AFN during initial EAE phase (J, n=6) and aided by XCL1-AFN later (K, n=6), but not in CD11c-IFNAR14-(L, n=6). Shown are representative experiments (A-H, J-L), or pooled results from 3 independent experiments (I, n=10). Differences were assessed using one-way or two-way ANOVA followed by Tukey's multiple-comparison test; * P<0.05, ** P<0.01, *** P<0.001 compared with PBS treated animals, unless otherwise indicated.

[0023] FIGS. 4A-D depict protective treatments produce tolerogenic pDC, Tregs and Bregs. Amounts of splenic pDC were increased on d12 (A), and more of them produced TFGb and IDO, but not IL-10 (B, n=4-5). Tregs were increased by Clec9A-AFN if counted within the CD3+ population (C, n=5). Both in the Treg and Breg population, the % of IL-10 or TGFβ producing cells increased (C,D, n=5). Differences were assessed using one-way ANOVA followed by Dunnett's multiple-comparison test; * P<0.05, ** P<0.01, *** P<0.001 compared with PBS treated animals.

[0024] FIG. 5 shows, without wishing to be bound by theory, a non-limiting schematic of AFN targeting and the proposed tolerizing effects during EAE. Targeting AFN via Clec9A or SiglecH to pDC tolerizes them, increasing their TGFβ and IDO expression. TGFβ and IDO-induced kynurenine synthesis are known to induce Tregs, while IDO-induced tryptophan catabolisminhibits Teff. Tregs and Bregs may increase each other's immunosuppressive effects via IL-10 and TGFβ; the latter will also inhibit immunogenic Teff and self-antigen presenting cells such as DC.

[0025] FIG. 6 depicts binding measurements in FACS of twelve selected VHH's to full length human Clec4C expressed in Hek293T. The mean fluorescence intensities were plotted as a function of the VHH concentration.

[0026] FIG. 7 shows biological activity of IFNa2 and Clec4C VHH Fc AFN on HL116 and HL116-hClec4C cells. Parental HL116 or the derived HL116-hClec4C cells were stimulated for 6 hours with a serial dilution of Fc AFNs. Average luciferase values (+STDEV) of triplicate measurements are plotted.

[0027] FIGS. 8A-C show schematic representation and biological activity of bi-specific Clec4C-CD8 Fc AFN variants (FIG. 8C) as well as monospecific CLEC4C Fc AFN (FIG. 8A) and monospecific CD8 Fc-AFN (FIG. 8B). Parental HL116, HL116-hClec4C and HL116-hCD8 cells were stimulated for 6 hours with a serial dilution of Fc AFNs. Average luciferase values (+STDEV) of triplicate measurements are plotted.

[0028] FIG. 9 shows biological activity of targeted wild type and mutant IFNa2 on C-Type Lectin Domain Family 4 Member C (Clec4C) positive and negative cells. Peripheral blood mononuclear cells (PBMC's) from healthy donors were stained with Clec4C Ab and stimulated with Clec4C-targeted wild type or mutant IFNa2 for 15 minutes. After fixation and permeabilization, cells were stained with a pSTAT1 Ab. Data are plotted as percentage of pSTAT1 positive cells.

[0029] FIGS. 10A-F, 11A-H, 12A-H, 13A-D, 14A-F, 15A-J, 16A-D, 17A-F, 18A-J, 19A-F, 20A-L, 21A-L, 22A-F, 23A-L, 24A-L, 25A-J, 26A-J, 27A-F, 28A-F, and 29A-D show various non-limiting illustrative schematics of the Fc-based chimeric protein complexes of the present invention. In embodiments, each schematic is a composition of the present invention. Where applicable in the figures, “TM” refers to a “targeting moiety” as described herein, “SA” refers to a “signaling agent” as described herein, [symbol] is an optional “linker” as described herein, the two long parallel rectangles are human Fc domains, having one or more Fc chains, e.g. from IgG1, from IgG2, or from IgG4, as described herein and optionally with effector knock-out and/or stabilization mutations as also described herein, and the two long parallel rectangles with one having a protrusion and the other having an indentation are human Fc domains, having one or more Fc chains, e.g. from IgG1, from IgG2, or from IgG4 as described herein, with knob-in-hole and/or ionic pair (a/k/a charged pairs, ionic bond, or charged residue pair) mutations as described herein and optionally with effector knock-out and/or stabilization mutations as also described herein.

[0030] FIGS. 10A-F show illustrative homodimeric 2-chain complexes. These figures show illustrative configurations for the homodimeric 2-chain complexes.

[0031] FIGS. 11A-H show illustrative homodimeric 2-chain complexes with two targeting moieties (TM) (as described herein, more targeting moieties may be present in some embodiments). In embodiments, the position of TM1 and TM2 are interchangeable. In embodiments, the constructs shown in the box (i.e., FIGS. 11B and 11C) have signaling agent (SA) between TM1 and TM2 or between TM1 and Fc.

[0032] FIGS. 12A-H show illustrative homodimeric 2-chain complexes with two signaling agents (as described herein, more signaling agents may be present in some embodiments). In embodiments, the position of SA1 and SA2 are interchangeable. In embodiments, the constructs shown in the box (i.e., FIGS. 12G and 12H) have TM between SA1 and SA2 or TM at N- or C-terminus.

[0033] FIGS. 13A-D show illustrative heterodimeric 2-chain complexes with split TM and SA chains, namely the TM on the knob chain of the Fc and the SA on hole chain of the Fc.

[0034] FIGS. 14A-F show illustrative heterodimeric 2-chain complexes with split TM and SA chains, namely with both TMs on the knob chain of the Fc and with SA on hole chain of the Fc, with two targeting moieties (as described herein, more targeting moieties may be present in some embodiments). In embodiments, the position of TM1 and TM2 are interchangeable. In some embodiments, TM1 and TM2 can be identical.

[0035] FIGS. 15A-J show illustrative heterodimeric 2-chain complexes with split TM and SA chains, namely with TM on the knob chain of the Fc and with a SA on the hole chain of the Fc, with two signaling agents (as described herein, more signaling agents may be present in some embodiments). In these orientations/configurations, one SA is on the knob chain and one SA is on the hole chain. In embodiments, the position of SA1 and SA2 are interchangeable.

[0036] FIGS. 16A-D show illustrative heterodimeric 2-chain complexes with split TM and SA chains, namely the SA on the knob chain of the Fc and the TM on hole chain of the Fc.

[0037] FIGS. 17A-F show illustrative heterodimeric 2-chain complexes with split TM and SA chains, namely with SA on the knob chain of the Fc and both TMs on hole chain of the Fc, with two targeting moieties (as described herein, more targeting moieties may be present in some embodiments). In embodiments, the position of TM1 and TM2 are interchangeable. In some embodiments, TM1 and TM2 can be identical.

[0038] FIGS. 18A-J show illustrative heterodimeric 2-chain complexes with split TM and SA chains, namely with SA on the knob chain of the Fc and TM on hole chain of the Fc, with two signaling agents (as described herein, more signaling agents may be present in some embodiments). In these orientations/configurations, one SA is on the knob chain and one SA is on the hole chain. In embodiments, the position of SA1 and SA2 are interchangeable.

[0039] FIGS. 19A-F show illustrative heterodimeric 2-chain complexes with TM and SA on the same chain, namely the SA and TM both on the knob chain of the Fc.

[0040] FIGS. 20A-L show illustrative heterodimeric 2-chain complexes with a TM and a SA on the same chain, namely with SA and with TM both on the knob chain of the Fc, with two targeting moieties (as described herein, more targeting moieties may be present in some embodiments). In embodiments, the position of TM1 and TM2 are interchangeable. In some embodiments, TM1 and TM2 can be identical.

[0041] FIGS. 21A-L show illustrative heterodimeric 2-chain complexes with a TM and a SA on the same chain, namely with SA and with TM both on the knob chain of the Fc, with two signaling agents (as described herein, more signaling agents may be present in some embodiments). In embodiments, the position of SA1 and SA2 are interchangeable.

[0042] FIGS. 22A-F show illustrative heterodimeric 2-chain complexes with TM and SA on the same chain, namely the SA and TM both on the hole chain of the Fc.

[0043] FIGS. 23A-L show illustrative heterodimeric 2-chain complexes with a TM and a SA on the same chain, namely with SA and with TM both on the hole chain of the Fc, with two targeting moieties (as described herein, more targeting moieties are present in some embodiments). In embodiments, the position of TM1 and TM2 are interchangeable. In embodiments, TM1 and TM2 can be identical.

[0044] FIGS. 24A-L show illustrative heterodimeric 2-chain complexes with a TM and a SA on the same chain, namely with SA and with TM both on the hole chain of the Fc, with two signaling agents (as described herein, more signaling agents may be present in some embodiments). In embodiments, the position of SA1 and SA2 are interchangeable.

[0045] FIGS. 25A-J show illustrative heterodimeric 2-chain complexes with two targeting moieties (as described herein, more targeting moieties may be present in some embodiments) and with SA on knob Fc and TM on each chain. In embodiments, TM1 and TM2 can be identical.

[0046] FIGS. 26A-J show illustrative heterodimeric 2-chain complexes with two targeting moieties (as described herein, more targeting moieties may be present in some embodiments) and with SA on hole Fc and TM on each chain. In embodiments, TM1 and TM2 can be identical.

[0047] FIGS. 27A-F show illustrative heterodimeric 2-chain complexes with two signaling agents (as described herein, more signaling agents may be present in some embodiments) and with split SA and TM chains: SA on knob and TM on hole Fc.

[0048] FIGS. 28A-F show illustrative heterodimeric 2-chain complexes with two signaling agents (as described herein, more signaling agents may be present in some embodiments) and with split SA and TM chains: TM on knob and SA on hole Fc.

[0049] FIGS. 29A-D show illustrative heterodimeric 2-chain complexes with two targeting moieties (as described herein, more targeting moieties are present in some embodiments) and with SA on knob Fc and TM on each chain. Each targeting moiety is present in 2 copies and the positions of TM1 and TM2 are interchangeable.

### DETAILED DESCRIPTION

[0050] The present invention is based, in part, on the discovery of agents (e.g. antibodies such as, by way of non-limiting example, VHHs) that selectively modulate pDC cells. The present invention is based, in part, on the discovery of agents (e.g. antibodies such as, by way of non-limiting example, VHHs) that recognize and bind to Clec4C. In some embodiments, the present pDC marker binding agents are part of a chimeric or fusion protein with one or more targeting moieties and/or one or more signaling agents. In some embodiments, the present Clec4C binding agents are part of a chimeric or fusion protein with one or more targeting moieties and/or one or more signaling agents. In some embodiments, these Clec4C binding agents bind to, but do not functionally modulate Clec4C.

[0051] In some embodiments, the present compositions and methods allow for immune modulation by targeting DCs, e.g. pDCs alone. That is, in embodiments, the compositions and methods relate to a selective modulation of pDC cells. For example, the present Clec4C binding agents and/or chimeric proteins or chimeric protein complexes having the present Clec4C binding agents provide selective modulation of pDCs over, for instance, cDC.

[0052] In some embodiments, the present compositions and methods allow for immune modulation by targeting DCs, e.g. pDCs and cDCs. That is, in embodiments, the compositions and methods relate to a combined modulation of pDCs and cDCs. For example, the present Clec4C binding agents and/or chimeric proteins or chimeric protein complexes having the present Clec4C binding agents are combined with Clec9A binding agents, as described herein, and/or chimeric proteins or chimeric protein complexes having the present Clec9A binding agents to provide selective modulation of pDCs and cDCs. Further, in embodiments, the multi-specific formats described herein (e.g. involving a chimeric protein or chimeric protein complex having two or more recognition domains) allow for targeting of Clec4C and Clec9A in the same agent (e.g. a chimeric protein or chimeric protein complex targeting Clec4C and Clec9A and comprising a modified signaling agent, e.g. a modified human IFNα). For example, the present Clec4C binding agents and/or chimeric proteins or chimeric protein complexes having the present Clec4C binding agents are combined with an XCR1 binding agent, for example an antibody or antibody format directed against XCR1, the ligand XCL1, or the ligand XCL2, as described herein, and/or chimeric proteins or chimeric protein complexes having the present XCR1 binding agents to provide selective modulation of pDCs and cDCs. Further, in embodiments, the multi-specific formats described herein (e.g. involving a chimeric protein or chimeric protein complex having two or more recognition domains) allow for targeting of Clec4C and XCR1 in the same agent (e.g. a chimeric protein or chimeric protein complex targeting Clec4C and XCR1 and comprising a modified signaling agent, e.g. a modified human IFNα).

[0053] In some embodiments, these Clec4C binding agents may bind and directly or indirectly recruit immune cells to sites in need of therapeutic action. In some embodiments, the present Clec4C binding agents exhibit beneficial therapeutic properties and reduced side effects. In some embodiments, the Clec4C binding agents enhance an immune response and, in embodiments, avoid or reduce autoimmunity.

[0054] In various embodiments, the Clec4C binding agents modulate antigen presentation. In some embodiments, the Clec4C binding agents temper the immune response to avoid or reduce autoimmunity. In some embodiments, the Clec4C binding agents provide immunosuppression. In some embodiments, the Clec4C binding agents cause an increase a ratio of Tregs to CD8+ T cells and/or CD4+ T cells in a patient. In some embodiments, the present methods relate to reduction of auto-reactive T cells in a patient.

[0055] The present invention provides pharmaceutical compositions comprising the Clec4C binding agents and their use in the treatment of various diseases, including autoimmune diseases.

### pDC and Clec4C Binding Agents

[0056] In various embodiments, the invention relates to a pDC marker binding agent.

[0057] In various embodiments, the present pDC marker binding agents find use in the treatment of various diseases or disorders such as autoimmune diseases, cancer, infections, immune disorders, and other diseases and disorders, and the present invention encompasses various methods of treatment.

[0058] In various embodiments, the present Clec4C binding agents find use in the treatment of various diseases or disorders such as autoimmune diseases, cancer, infections, immune disorders.

[0059] In various embodiments, the present Clec4C binding agent is a protein-based agent capable of specific binding to Clec4C. In various embodiments, the present Clec4C binding agent is a protein-based agent capable of specific binding to Clec4C without functional modulation (e.g., partial or full neutralization) of Clec4C. Clec4C is a type II transmembrane glycoprotein that belongs to the C-type lectin (CTLs) superfamily, found on the surface of plasmacytoid dendritic cells (pDC) specialized for secretion of type I IFN and the detection of viral nucleic acids. Clec4C is a receptor that inhibits type I IFN secretion, thereby preventing immune surveillance. Clec4C binding agents are involved in various other pDC functions, such as inhibition of soluble TNF-related apoptosis-inducing ligand (TRAIL) secretion. Clec4C was also shown to function as an antigen receptor, which pDCs use to internalize and process certain antigens which are then presented to T cells. (Riboldi et al. Human C-type Lectin Domain Family 4, Member C (CLEC4C/BDCA-2/CD303) Is a Receptor for Asialo-galactosyl-oligosaccharides, J Biol Chem. 2011 Oct. 14; 286 (41): 35329-35333.

[0060] In various embodiments, the Clec4C binding agent of the invention comprises a targeting moiety having an antigen recognition domain that recognizes an epitope present on Clec4C. In an embodiment, the antigen-recognition domain recognizes one or more linear epitopes present on Clec4C. As used herein, a linear epitope refers to any continuous sequence of amino acids present on Clec4C. In another embodiment, the antigen-recognition domain recognizes one or more conformational epitopes present on Clec4C. As used herein, a conformation epitope refers to one or more sections of amino acids (which may be discontinuous) which form a three-dimensional surface with features and/or shapes and/or tertiary structures capable of being recognized by an antigen recognition domain.

[0061] In various embodiments, the Clec4C binding agent of the present invention may bind to the full-length and/or mature forms and/or isoforms and/or splice variants and/or fragments and/or any other naturally occurring or synthetic analogs, variants, or mutants of human Clec4C. In various embodiments, the Clec4C binding agent of the invention may bind to any forms of the human Clec4C, including monomeric, dimeric, heterodimeric, multimeric and associated forms. In an embodiment, the Clec4C binding agent binds to the monomeric form of Clec4C. In another embodiment, the Clec4C binding agent binds to a dimeric form of Clec4C. In a further embodiment, the Clec4C binding agent binds to glycosylated form of Clec4C, which may be either monomeric or dimeric.

[0062] In various embodiments, the pDC marker binding agent further comprises a signaling agent, e.g., without limitation, an interferon, an interleukin, a chemokine and a tumor necrosis factor, that may be modified to attenuate activity. In various embodiments, the pDC marker binding agent comprises additional targeting moieties that bind to other targets (e.g. antigens, receptor) of interest. In an embodiment, the other targets (e.g. antigens, receptor) of interest are present on tumor cells. In another embodiment, the other targets (e.g. antigens, receptor) of interest are present on immune cells. In some embodiments, the present pDC marker binding agent may directly or indirectly recruit an immune cell (e.g. a dendritic cell) to a site of action (such as, by way of non-limiting example, the tumor microenvironment). In some embodiments, the present pDC marker binding agent facilitates the presentation of antigens (e.g., tumor antigens) by dendritic cells. In an embodiment, the other targets (e.g. antigens, receptor) of interest are present on cells, tissues, and organ sites affected by autoimmune disease. In some embodiments, the present pDC marker binding agent may directly or indirectly recruit an immune cell (e.g. a dendritic cell) to a site of action (such as, by way of non-limiting example, cells, tissues, and organ sites affected by autoimmune disease).

[0063] In various embodiments, the Clec4C binding agent further comprises a signaling agent, e.g., without limitation, an interferon, an interleukin, a chemokine and a tumor necrosis factor, that may be modified to attenuate activity. In various embodiments, the Clec4C binding agent comprises additional targeting moieties that bind to other targets (e.g. antigens, receptor) of interest. In an embodiment, the other targets (e.g. antigens, receptor) of interest are present on tumor cells. In another embodiment, the other targets (e.g. antigens, receptor) of interest are present on immune cells. In some embodiments, the present Clec4C binding agent may directly or indirectly recruit an immune cell (e.g. a dendritic cell) to a site of action (such as, by way of non-limiting example, the tumor microenvironment). In some embodiments, the present Clec4C binding agent facilitates the presentation of antigens (e.g., tumor antigens) by dendritic cells. In an embodiment, the other targets (e.g. antigens, receptor) of interest are present on cells, tissues, and organ sites affected by autoimmune disease. In some embodiments, the present pDC marker binding agent may directly or indirectly recruit an immune cell (e.g. a dendritic cell) to a site of action (such as, by way of non-limiting example, cells, tissues, and organ sites affected by autoimmune disease).

[0064] In various embodiments, the present pDC marker binding agents and/or Clec4C binding agents, inclusive of chimeric proteins or chimeric protein complexes comprising the same, find use in the treatment of various diseases or disorders such as autoimmune diseases or disorders. In various embodiments, the present pDC marker binding agents and/or Clec4C binding agents, inclusive of chimeric proteins or chimeric protein complexes comprising the same, find use in inducing immune tolerance.

[0065] In various embodiments, the present pDC marker binding agents and/or Clec4C binding agents, inclusive of chimeric proteins or chimeric protein complexes comprising the same, find use in modulating the immune system. In embodiments, the present pDC marker binding agents and/or Clec4C binding agents, inclusive of chimeric proteins or chimeric protein complexes comprising the same, find use in preferentially effecting pDCs over, for example, cDC. In embodiments, the present pDC marker binding agents and/or Clec4C binding agents, inclusive of chimeric proteins or chimeric protein complexes comprising the same, find use in preferentially delivering an IFN signal to pDCs over, for example, cDC. In embodiments, the present pDC marker binding agents and/or Clec4C binding agents, inclusive of chimeric proteins or chimeric protein complexes comprising the same, find use in modulating pDCs and, accordingly increasing the number of suppressive immune cells such as those described elsewhere herein (e.g., without limitation, Tregs). In various embodiments, the present pDC marker binding agents and/or Clec4C binding agents, inclusive of chimeric proteins or chimeric protein complexes comprising the same, shift the ratio of immune cells in a subject to favor suppressive immune cells e.g. myeloid-derived suppressor cells (MDSCs), regulatory T cells (Tregs); tumor associated neutrophils (TANs), M2 macrophages, tumor associated macrophages (TAMs), or subsets thereof over immune stimulated cells e.g. anti-tumor macrophages (e.g. M1 macrophages), T cells, cytotoxic T lymphocytes, T helper cells, natural killer (NK) cells, natural killer T (NKT) cells, B cells, and dendritic cells.

[0066] In various embodiments, the present pDC marker binding agents and/or Clec4C binding agents, inclusive of chimeric proteins or chimeric protein complexes comprising the same, induce expression of PD-L1 and/or CTLA-4, e.g., without limitation in pDCs.

[0067] In various embodiments, the present pDC marker binding agents and/or Clec4C binding agents, inclusive of chimeric proteins or chimeric protein complexes comprising the same, target IFN type 1 signaling (e.g. via attenuated human IFN-α2, e.g. human IFN-α2 bearing a R149A mutation) to pDCs can elicit a tolerogenic effect and protect, inhibit, reverse autoimmune conditions.

[0068] In various embodiments, the present compositions and methods find use not only in targeting pDCs but also in targeting cDCs. For instance, in various embodiments, the present invention relates to a co-administration of the present pDC marker binding agents and/or Clec4C binding agents, inclusive of chimeric proteins or chimeric protein complexes comprising the same, and Clec9A binding agents (such as those described herein), inclusive of chimeric proteins or chimeric protein complexes comprising the same. In various embodiments, the present invention relates to a co-administration of the present pDC marker binding agents and/or Clec4C binding agents, inclusive of chimeric proteins or chimeric protein complexes comprising the same (e.g. linked to attenuated human IFN-α2, optionally being a human IFN-α2 bearing a R149A mutation), and Clec9A binding agents (such as those described herein), inclusive of chimeric proteins or chimeric protein complexes comprising the same e.g. linked to attenuated human IFN-α2, optionally being a human IFN-α2 bearing a R149A mutation).

[0069] In an embodiment, the present Clec4C binding agent comprises a targeting moiety with an antigen recognition domain that recognizes one or more epitopes present on human Clec4C. In an embodiment, the human Clec4C extracellular domain (aa 45-213) comprises the amino acid sequence of:

(SEQ ID NO: 1226)
NFMYSKTVKRLSKLREYQQYHPSLTCVMEGKDIEDWSCCPTPWTSFQSSCY
FISTGMQSWTKSQKNCSVMGADLVVINTREEQDFIIQNLKRNSSYFLGLSD
PGGRRHWQWVDQTPYNENVTFWHSGEPNNLDERCAIINFRSSEEWGWNDIH
CHVPQKSICKMKKIYI.

[0070] In various embodiments, the present Clec4C binding agent comprises a targeting moiety capable of specific binding. In various embodiments, the Clec4C binding agent comprises a targeting moiety having an antigen recognition domain such as an antibody or derivatives thereof. In an embodiment, the Clec4C binding agent comprises a targeting moiety which is an antibody. In various embodiments, the antibody is a full-length multimeric protein that includes two heavy chains and two light chains. Each heavy chain includes one variable region (e.g., V_{H}) and at least three constant regions (e.g., CH₁, CH₂ and CH₃), and each light chain includes one variable region (V_{L}) and one constant region (CL). The variable regions determine the specificity of the antibody. Each variable region comprises three hypervariable regions also known as complementarity determining regions (CDRs) flanked by four relatively conserved framework regions (FRs). The three CDRs, referred to as CDR1, CDR2, and CDR3, contribute to the antibody binding specificity. In some embodiments, the antibody is a chimeric antibody. In some embodiments, the antibody is a humanized antibody.

[0071] In some embodiments, the Clec4C binding agent comprises a targeting moiety which is an antibody derivative or format. In some embodiments, the present Clec4C binding agent comprises a targeting moiety which is a single-domain antibody, a recombinant heavy-chain-only antibody (VHH), a single-chain antibody (scFv), a shark heavy-chain-only antibody (VNAR), a microprotein (cysteine knot protein, knottin), a DARPin; a Tetranectin; an Affibody; a Transbody; an Anticalin; an AdNectin; an Affilin; an Affimer, a Microbody; an aptamer; an alterase; a plastic antibody; a phylomer; a stradobody; a maxibody; an evibody; a fynomer, an armadillo repeat protein, a Kunitz domain, an avimer, an atrimer, a probody, an immunobody, a triomab, a troybody; a pepbody; a vaccibody, a UniBody; a DuoBody, a Fv, a Fab, a Fab′, a F(ab′)₂, a peptide mimetic molecule, or a synthetic molecule, as described in US Patent Nos. or Patent Publication Nos. U.S. Pat. No. 7,417,130, US 2004/132094, U.S. Pat. No. 5,831,012, US 2004/023334, U.S. Pat. Nos. 7,250,297, 6,818,418, US 2004/209243, U.S. Pat. Nos. 7,838,629, 7,186,524, 6,004,746, 5,475,096, US 2004/146938, US 2004/157209, U.S. Pat. Nos. 6,994,982, 6,794,144, US 2010/239633, U.S. Pat. No. 7,803,907, US 2010/119446, and/or U.S. Pat. No. 7,166,697, the contents of which are hereby incorporated by reference in their entireties. See also, Storz MAbs. 2011 May-Jun; 3 (3): 310-317.

[0072] In some embodiments, the Clec4C binding agent comprises a targeting moiety which is a single-domain antibody, such as a VHH. The VHH may be derived from, for example, an organism that produces VHH antibody such as a camelid, a shark, or the VHH may be a designed VHH. VHHs are antibody-derived therapeutic proteins that contain the unique structural and functional properties of naturally-occurring heavy-chain antibodies. VHH technology is based on fully functional antibodies from camelids that lack light chains. These heavy-chain antibodies contain a single variable domain (VHH) and two constant domains (CH2 and CH3).

[0073] In an embodiment, the Clec4C binding agent comprises a VHH. In some embodiments, the VHH is a humanized VHH or camelized VHH.

[0074] In some embodiments, the VHH comprises a fully human V_{H} domain, e.g. a HUMABODY (Crescendo Biologics, Cambridge, UK). In some embodiments, fully human V_{H} domain, e.g. a HUMABODY is monovalent, bivalent, or trivalent. In some embodiments, the fully human V_{H} domain, e.g. a HUMABODY is mono- or multi-specific such as monospecific, bispecific, or trispecific. Illustrative fully human V_{H} domains, e.g. a HUMABODIES are described in, for example, WO2016/113555 and WO2016/113557, the entire disclosure of which is incorporated by reference.

[0075] In some embodiments, the Clec4C binding agent comprises a targeting moiety which is a VHH comprising a single amino acid chain having four “framework regions” or FRs and three “complementary determining regions” or CDRs. As used herein, “framework region” or “FR” refers to a region in the variable domain which is located between the CDRs. As used herein, “complementary determining region” or “CDR” refers to variable regions in VHHs that contains the amino acid sequences capable of specifically binding to antigenic targets.

[0076] In various embodiments, the Clec4C binding agent comprises a VHH having a variable domain comprising at least one CDR1, CDR2, and/or CDR3 sequences. In various embodiments, the Clec4C binding agent comprises a VHH having a variable region comprising at least one FR1, FR2, FR3, and FR4 sequences.

In some embodiments, a human Clec4C CDR1
sequence is selected from:
(SEQ ID NO: 1227)
GSTFRHHAMA,
(SEQ ID NO: 1228)
GSTFRHHALA,
(SEQ ID NO: 1229)
GSTFKHHAMA,
(SEQ ID NO: 1230)
GNNFEHYAVA,
(SEQ ID NO: 1231)
GDTFSMYAMG,
(SEQ ID NO: 1232)
GDTFSMYTMG,
(SEQ ID NO: 1233)
GNTFSMYAMG,
(SEQ ID NO: 1234)
TDTFSSLAMA,
(SEQ ID NO: 1235)
GRTFSNYAMG,
(SEQ ID NO: 1236)
GRTFSDYAMG,
(SEQ ID NO: 1237)
GRTFSGYAMG,
(SEQ ID NO: 1238)
GRTFTGYAMG,
(SEQ ID NO: 1239)
GLTFGRYAMG,
(SEQ ID NO: 1240)
GFTFDGYAIG,
(SEQ ID NO: 1241)
GFTFSDYAVG,
(SEQ ID NO: 1242)
GSTFSDYAVG,
(SEQ ID NO: 1243)
GRTFINYAMG,
(SEQ ID NO: 1244)
GRTFSNYAMG,
(SEQ ID NO: 1245)
GDTFSNYAMG,
(SEQ ID NO: 1246)
ERTFSNYAMG,
(SEQ ID NO: 1247)
VFTLNNFIMS,
(SEQ ID NO: 1248)
GRTFSTYAMG,
(SEQ ID NO: 1249)
GRNLAYYVMG,
(SEQ ID NO: 1250)
GFDFSDYVMY,
(SEQ ID NO: 1251)
GRSISNYNMG,
(SEQ ID NO: 1252)
GRIFSINAMG,
(SEQ ID NO: 1253)
GRTFSSYAMG,
(SEQ ID NO: 1254)
GRTFSSLAMG,
(SEQ ID NO: 1255)
ERTFTNYAMG,
(SEQ ID NO: 1256)
GRTFTNYAMG,
(SEQ ID NO: 1257)
ERTFTNYAMA,
(SEQ ID NO: 1258)
GRIFSNSAMG,
(SEQ ID NO: 1259)
GREISSPAMG,
(SEQ ID NO: 1260)
GRDFANDAVA,
(SEQ ID NO: 1261)
GRTFSNYAMG,
(SEQ ID NO: 1262)
GDTFSMYAMG,
(SEQ ID NO: 1263)
GRDFANDAVA,
(SEQ ID NO: 1264)
HHAMA,
(SEQ ID NO: 1265)
HHALA,
(SEQ ID NO: 1266)
HYAVA,
(SEQ ID NO: 1267)
MYAMG,
(SEQ ID NO: 1268)
MYTMG,
(SEQ ID NO: 1269)
SLAMA,
(SEQ ID NO: 1270)
NYAMG,
(SEQ ID NO: 1271)
DYAMG,
(SEQ ID NO: 1272)
GYAMG,
(SEQ ID NO: 1273)
RYAMG,
(SEQ ID NO: 1274)
GYAIG,
(SEQ ID NO: 1275)
DYAVG,
(SEQ ID NO: 1276)
NFIMS,
(SEQ ID NO: 1277)
TYAMG,
(SEQ ID NO: 1278)
YYVMG,
(SEQ ID NO: 1279)
DYVMY,
(SEQ ID NO: 1280)
NYNMG,
(SEQ ID NO: 1281)
INAMG,
(SEQ ID NO: 1282)
SYAMG,
(SEQ ID NO: 1283)
SLAMG,
(SEQ ID NO: 1284)
NYAMA,
(SEQ ID NO: 1285)
NSAMG,
(SEQ ID NO: 1286)
SPAMG,
(SEQ ID NO: 1287)
NDAVA,
and
(SEQ ID NO: 1288)
DYVMY.
In some embodiments, a human Clec4C CDR2
sequence is selected from:
(SEQ ID NO: 1289)
AINDHGTKTR,
(SEQ ID NO: 1290)
AINDHGDRTK,
(SEQ ID NO: 1291)
AINNHGTKTR,
(SEQ ID NO: 1292)
AIRDYGDRTR,
(SEQ ID NO: 1293)
AISRSGGSTD,
(SEQ ID NO: 1294)
AISRSGGSTN,
(SEQ ID NO: 1295)
AISRSGSSTN,
(SEQ ID NO: 1296)
AISWSGASTV,
(SEQ ID NO: 1297)
AISWSGDSTV,
(SEQ ID NO: 1298)
TISVSGSSTD,
(SEQ ID NO: 1299)
TISKSGSSTD,
(SEQ ID NO: 1300)
TISTSGSSTY,
(SEQ ID NO: 1301)
RISRSGNSTG,
(SEQ ID NO: 1302)
RISRSGDSTG,
(SEQ ID NO: 1303)
RISRSGDNTG,
(SEQ ID NO: 1304)
CINKSDGLTY,
(SEQ ID NO: 1305)
RITRLGNGPY,
(SEQ ID NO: 1306)
AISTSGSNTY,
(SEQ ID NO: 1307)
AISTSGGSTA,
(SEQ ID NO: 1308)
AISRSAGSTY,
(SEQ ID NO: 1309)
AISTSGGTTD,
(SEQ ID NO: 1310)
DINMVGITD,
(SEQ ID NO: 1311)
AIATNGGTTY,
(SEQ ID NO: 1312)
TLTRGGDDTY,
(SEQ ID NO: 1313)
SINASGVRTY,
(SEQ ID NO: 1314)
SIRWDGDSTY,
(SEQ ID NO: 1315)
VISRSGISN,
(SEQ ID NO: 1316)
VISWRNNTY,
(SEQ ID NO: 1317)
AINWSGDSTY,
(SEQ ID NO: 1318)
AISRSGSSTS,
(SEQ ID NO: 1319)
TISRSGSMPY,
(SEQ ID NO: 1320)
AVEWSSGSTF,
(SEQ ID NO: 1321)
TISRSGSSTF,
(SEQ ID NO: 1322)
AISENSSILY,
(SEQ ID NO: 1323)
YISRTGGSTK,
(SEQ ID NO: 1324)
TINWSSGATL,
(SEQ ID NO: 1325)
GIGSNNGTL,
(SEQ ID NO: 1326)
AINDHGTKTRYSDSVRG,
(SEQ ID NO: 1327)
AINDHGDRTKYLDSVRG,
(SEQ ID NO: 1328)
AINNHGTKTRYSDSVRG,
(SEQ ID NO: 1329)
AINDHGDRTKYTDSVRG,
(SEQ ID NO: 1330)
AINDHGDRTKYSDSVRG,
(SEQ ID NO: 1331)
AIRDYGDRTRYDDSVKG,
(SEQ ID NO: 1332)
AIRDYGDRTRYADSVKG,
(SEQ ID NO: 1333)
AISRSGGSTDYRDSVKG,
(SEQ ID NO: 1334)
AISRSGGSTNYRDSVKG,
(SEQ ID NO: 1335)
AISRSGSSTNYRDSVKG,
(SEQ ID NO: 1336)
AISWSGASTVYGDSVKG,
(SEQ ID NO: 1337)
AISWSGDSTVYGDSVKG,
(SEQ ID NO: 1338)
TISVSGSSTDYADSVKG,
(SEQ ID NO: 1339)
TISKSGSSTDYADSAKG,
(SEQ ID NO: 1340)
TISTSGSSTYYADSVKG,
(SEQ ID NO: 1341)
RISRSGNSTGYADSVKG,
(SEQ ID NO: 1342)
RISRSGDSTGYADSVKG,
(SEQ ID NO: 1343)
RISRSGDNTGYADSVKG,
(SEQ ID NO: 1344)
CINKSDGLTYYEDSVKG,
(SEQ ID NO: 1345)
RITRLGNGPYYSASVKG,
(SEQ ID NO: 1346)
AISTSGSNTYLADSLKA,
(SEQ ID NO: 1347)
AISTSGGSTAYADSVKG,
(SEQ ID NO: 1348)
AISRSAGSTYHVDSVKG,
(SEQ ID NO: 1349)
AISTSGGTTDYVDSVKG,
(SEQ ID NO: 1350)
DINMVGITDYSDPVKG,
(SEQ ID NO: 1351)
AIATNGGTTYYVDSVKG,
(SEQ ID NO: 1352)
TLTRGGDDTYCADSVKG,
(SEQ ID NO: 1353)
SINASGVRTYYVDALKG,
(SEQ ID NO: 1354)
SIRWDGDSTYYADSVKG,
(SEQ ID NO: 1355)
VISRSGISNYVDSVKG,
(SEQ ID NO: 1356)
VISWRNNTYYADSVKG,
(SEQ ID NO: 1357)
AINWSGDSTYYSDSMKG,
(SEQ ID NO: 1358)
AISRSGSSTSYADSVKG,
(SEQ ID NO: 1359)
TISRSGSMPYYADSVKG,
(SEQ ID NO: 1360)
AVEWSSGSTFYTDSVKG,
(SEQ ID NO: 1361)
TISRSGSSTFYAESVKG,
(SEQ ID NO: 1362)
AISENSSILYYTASVKG,
(SEQ ID NO: 1363)
YISRTGGSTKYENSVKG,
(SEQ ID NO: 1364)
TINWSSGATLTADSVKG,
and
(SEQ ID NO: 1365)
GIGSNNGTLTADSVKG.
In some embodiments, a human Clec4C CDR3
sequence is selected from:
(SEQ ID NO: 1366)
GPLVDYLETVPVVYTY,
(SEQ ID NO: 1367)
GPLVDYLETTPLVYTY,
(SEQ ID NO: 1368)
GPLNDYLEVTPLVYTY,
(SEQ ID NO: 1369)
RLTFSTTTAYTGELQYPY,
(SEQ ID NO: 1370)
RLTFSTTTTYTGELQYPY,
(SEQ ID NO: 1371)
RLTFSTTDAYTGKLQYPY,
(SEQ ID NO: 1372)
DLDGRTWHGDDLEYDY,
(SEQ ID NO: 1373)
RLSFDNTALYTSANRYSY,
(SEQ ID NO: 1374)
RLSFDNTAFYTSAIRYSD,
(SEQ ID NO: 1375)
RLSFDNTAFYTSAIRYSY,
(SEQ ID NO: 1376)
TTSWLPGHNANVYDY,
(SEQ ID NO: 1377)
GTSWVPGHNANAYDY,
(SEQ ID NO: 1378)
AWECDYAPADFGS,
(SEQ ID NO: 1379)
GRTLASTHDTKTSPQTYDY,
(SEQ ID NO: 1380)
RLSFDDSAYYTSTLRYAY,
(SEQ ID NO: 1381)
RLSFSGSSYYQGPLQYPY,
(SEQ ID NO: 1382)
RLTFNLIDYYTAETRYTY,
(SEQ ID NO: 1383)
RLDFSSTDLYTTAPRYPY,
(SEQ ID NO: 1384)
GRPIGLYYPSPRIRDYND,
(SEQ ID NO: 1385)
RLSFGSGYYTNKLNYAY,
(SEQ ID NO: 1386)
RLAVLSSNTYCSGLWDY,
(SEQ ID NO: 1387)
VGQAPMYFGVDF,
(SEQ ID NO: 1388)
TVSSFDESKNPRWYPY,
(SEQ ID NO: 1389)
DVLLTFNKREDS,
(SEQ ID NO: 1390)
AGLGAVVAGMSDYDY,
(SEQ ID NO: 1391)
DASGYGSAWPDRYDY,
(SEQ ID NO: 1392)
APLVLKTTPGAYNY,
(SEQ ID NO: 1393)
NVLVTTTRLDQYDS,
(SEQ ID NO: 1394)
DHTGKLVFSKTSDY,
(SEQ ID NO: 1395)
RPLVPSEDPDNYNY,
(SEQ ID NO: 1396)
YGSTTIRTTTRPTK,
(SEQ ID NO: 1397)
HYNGVYQDSQSYDY,
(SEQ ID NO: 1398)
GATGVFRIARAYSY,
and
(SEQ ID NO: 1399)
GPTFFRIARAYPY.

[0077] In various illustrative embodiments, a human Clec4C binding agent comprises an amino acid sequence selected from the following sequences:

1CL21:
(SEQ ID NO: 1400)
QVQLQESGGGLVRPGGSLRLSCVGSGSTFRHHAMAWFRQTTGKEREFVSAINDHGTKTRYSDSVRGRFTISRD
NDENMVYLQMDNLRPEDTAVYSCAAGPLVDYLETVPVVYTYWGQGTQVTVSS;
1CL25:
(SEQ ID NO: 1401)
QVQLQESGGGLVQPGGSLRLSCAASGSTFRHHAMAWFRQTPGKEREFVSAINDHGDRTKYLDSVRGRFTISRD
NTDNMVYLLMSDLRPEDTAVYSCAAGPLVDYLETTPLVYTYWGQGTQVTVSS;
1CL48:
(SEQ ID NO: 1402)
QVQLQESGGGLVQPGGSLRLSCVGSGSTFRHHAMAWFRQTAGKEREFVSAINNHGTKTRYSDSVRGRFTISRD
NDENMVYLQMDNLRPEDTAVYSCAAGPLVDYLETVPVVYTYWGQGTQVTVSS;
1CL72:
(SEQ ID NO: 1403)
QVQLQESGGGLVQPGESLKLSCAGSGSTFRHHAMAWFRQXPGKEREFVSAINDHGDRTKYLDSVRGRFTISRD
NTNNMVYLQMSDLRPEDTANYSCAAGPLVDYLETTPLVYTYWGQGTQVTVSS;
2CL4:
(SEQ ID NO: 1404)
QVQLQESGGGLVQPGGSLRISCAGSGSTFRHHAMAWFRQTAGKEREFVSAINDHGTKTRYSDSVRGRFTISRD
NDENMVYLQMDNLRSEDTANYTCAAGPLVDYLETVPVVYTYWGQGTQVTVSS;
2CL8:
(SEQ ID NO: 1405)
QVQLQESGGGLVQPGGSLKLSCAGSGSTFRHHALAWFRQTAEKEREFVSAINDHGTKTRYSDSVRGRFTISRD
NDGNMVYLQMDNLRPEDTAVYSCAAGPLVDYLETVPVVYTYWGQGTQVTVSS;
2CL41:
(SEQ ID NO: 1406)
QVQLQESGGGLVQAGGSLRLSCAASGSTFRHHAMAWFRQTPGKEREFVSAINDHGDRTKYLDSVRGRFTISRD
NTDNMVYLQMSDLRTEDTAVYTCAAGPLVDYLETTPLVYTYWGQGTQVTVSS;
2CL72:
(SEQ ID NO: 1407)
QVQLQESGGGLVQPGGSLKLSCAASGSTFRHHAMAWFRQTPGKEREFVSAINDHGDRTKYLDSVRGRFTISRD
NTDNMVYLQMSDLRPEDTAVYSCAAGPLVDYLETTPLVYTYWGQGTQVTVSS;
2CL78:
(SEQ ID NO: 1408)
QVQLQESGGGVVQPGGSLKLSCAASGSTFRHHAMAWFRQTPGKEREFVSAINDHGDRTKYLDSVRGRFTISRD
DTDNMVYLQMSDLRTEDTAVYTCAAGPLVDYLETTPLVYTYWGQGTQVTVSS;
2CL87:
(SEQ ID NO: 1409)
QVQLQESGGGLVQPGGSLRLSCAGSGSTFRHHAMAWFRQTPGKEREFVSAINDHGDRTKYTDSVRGRFTISRD
NTDNMVYLQMSDLRPEDTAVYSCAAGPLVDYLETTPLVYTYWGQGTQVTVSS;
2CL88:
(SEQ ID NO: 1410)
QVQLQESGGGLVQPGGSLKLSCTGSGSTFRHHAMAWFRQTPGKEREFVAAINDHGDRTKYLDSVRGRFTISRD
NTDNMVYLQMSDLRPEDTANYSCAAGPLVDYLETTPLVYTYWGQGTQVTVSS;
2CL90:
(SEQ ID NO: 1411)
QVQLQESGGGLVQAGGSLRLSCAASGSTFRHHAMAWFRQTPGKGREFVSAINDHGDRTKYLDSVRGRFTISRD
NTDNMVYLQMSDLRPEDTAVYSCAAGPLVDYLETTPLVYTYWGQGTQVTVSS;
2CL95:
(SEQ ID NO: 1412)
QVQLQESGGGLVQPGGSLKLSCAGSGSTFKHHAMAWFRHTPGKEREFVSAINDHGDRTKYSDSVRGRFTIARD
NTDNMVYLQMDDLLPEDTANYTCAAGPLVDYLETTPLVYTYWGQGTQVTVSS;
1CL54:
(SEQ ID NO: 1413)
QVQLQESGGGLAQAGASLRLSCAGSGNNFEHYAVAWFRQDAPGKERDFVAAIRDYGDRTRYDDSVKGRFTISR
DNAKSMVYLEMNNLKPKDAAVYYCAAGPLNDYLEVTPLVYTYWGQGTQVTVSS;
2CL52:
(SEQ ID NO: 1414)
QVQLQESGGGLAQAGASLRLSCAGSGNNFEHYAVAWFRQEAPGKERDFVAAIRDYGDRTRYADSVKGRFTISR
DNAKSMVYLEMNNLKPEDTAVYYCTAGPLNDYLEVTPLVYTYWGQGTQVTVSS;
1CL2:
(SEQ ID NO: 1415)
QVQLQESGGGLVQAGDSLRLSCAASGDTFSMYAMGWFRQAPGKEREFVAAISRSGGSTDYRDSVKGRFTISR
DNDLNAGYLQMNSLKPEDTAVYYCALRLTFSTTTAYTGELQYPYWGQGTQVTVSS;
1CL32:
(SEQ ID NO: 1416)
QVQLQESGGGLVQAGDSLRLSCAASGDTFSMYTMGWFRQAPGKEREFVAAISRSGGSTNYRDSVKGRFTISRD
NDLNAGYLQMNSLKPEDTAVYYCALRLTFSTTTAYTGELQYPYWGQGTQVTVSS;
2CL58:
(SEQ ID NO: 1417)
QVQLQESGGGLVQAGDSLRLSCAASGDTFSMYAMGWFRQAPGKEREFVAAISRSGSSTNYRDSVKGRFTISRD
NDLNAGYLQMNSLKPEDTAVYYCALRLTFSTTTTYTGELQYPYWGQGTQVTVSS;
2CL73:
(SEQ ID NO: 1418)
QVQLQESGGGLVQAGDSLRLSCAASGNTFSMYAMGWFRQAPGKEREFVAAISRSGGSTNYRDSVKGRFTISR
DNDLNAGYLQMNNLKPEDTAVYYCALRLTFSTTDAYTGKLQYPYWGQGTQVTVSS;
2CL43:
(SEQ ID NO: 1419)
QVQLQESGGGTVQPGESLRLSCEVSTDTFSSLAMAWFRQATGKDREFVAAISWSGASTVYGDSVKGRFTMTR
DHPKKMVYLQMDNLKPEDTAVYYCAGDLDGRTWHGDDLEYDYWGQGTQVTVSS;
2CL82:
(SEQ ID NO: 1420)
QVQLQESGGGLVQPGGSLRLSCEVSTDTFSSLAMAWFRQATGKEREFVAAISWSGASTVYGDSVKGRFTMTR
DHPKKMVYLQMDNLKPEDTAVYYCAGDLDGRTWHGDDLEYDYWGQGTQVTVSS;
2CL89:
(SEQ ID NO: 1421)
QVQLQESGGGTVQPGESLRLSCEVSTDTFSSLAMAWFRQATAKDREFVAAISWSGDSTVYGDSVKGRFTMTR
DHPKKMVYLQMDNLKPEDTAVYYCAGDLDGRTWHGDDLEYDYWGQGTQVTVSS;
2CL25:
(SEQ ID NO: 1422)
QVQLQESGGGSVQAGGSLRLSCAASGRTFSNYAMGXFRQTPGKEREFVATISVSGSSTDYADSVKGRFTISRD
NAKKTVYLQINSLKTEDTAVYYCAARLSFDNTALYTSANRYSYWGQGTQVTVSS;
2CL84:
(SEQ ID NO: 1423)
QVQLQESGGGSVQAGGSLRLSCAASGRTFSDYAMGWFRQAPGKEREFVATISKSGSSTDYADSAKGRFTISRD
NAKKTVYLQINSLKTEDTAVYYCAARLSFDNTAFYTSAIRYSDWGQGTQVTVSS;
2CL92:
(SEQ ID NO: 1424)
QVQLQESGGGSVQAGDSLRLSCAASGRTFSGYAMGWFRQAPGKEREFVATISTSGSSTYYADSVKGRFTISRD
NAKKSVYLQINSLKTEDAAVYYCAARLSFDNTAFYTSAIRYSYWGQGTQVTVSS;
2CL21:
(SEQ ID NO: 1425)
QVQLQESGGGLVQAGGSLRLSCAASGRTFTGYAMGWFRQVPGLEREFVARISRSGNSTGYADSVKGRFTVSR
DNAKSTMYLQMNSLKTEDTAVYYCAATTSWLPGHNANVYDYWGQGTQVTVSS;
2CL30:
(SEQ ID NO: 1426)
QVQLQESGGGSVQAGGSLRLSCAASGRTFSDYAMGWFRQVPGLEREFVARISRSGDSTGYADSVKGRFTVSR
DNAKNTVYLQMNSLKTEDTAVYYCAATTSWLPGHNANVYDYWGQGTQVTVSS;
2CL71:
(SEQ ID NO: 1427)
QVQLQESGGGLVQAGGSLRLSCAASGLTFGRYAMGWFRQVPGLEREFIARISRSGDNTGYADSVKGRFTVSRD
SAKSTVYLQMNSLKTEDTAVYYCAAGTSWVPGHNANAYDYWGQGTQVTVSS;
2CL7:
(SEQ ID NO: 1428)
QVQLQESGGGLVQAGDSLRLSCAPSGFTFDGYAIGWFRQAPGKEREKVACINKSDGLTYYEDSVKGRFTISSDT
AKNTIHLQMNSLKPDDTAVYYCAAAWECDYAPADFGSWGQGTQVTVSS;
2CL18:
(SEQ ID NO: 1429)
QVQLQESGGGLVQAGGSLRLSCAPSGFTFDGYAIGWFRQAPGKEREKVACINKSDGLTYYEDSVKGRFTISSDT
AKNTIHLQMNSLKPDDTAVYYCAAAWECDYAPADFGSWGQGTQVTVSS;
2CL26:
(SEQ ID NO: 1430)
QVQLQESGGGWVQPGDSLRLSCAASGFTFSDYAVGWFRQAPGKEREFVARITRLGNGPYYSASVKGRFTISRD
NARDMAYLKMDALTPEDTATYYCAAGRTLASTHDTKTSPQTYDYWGLGTQVTVSS;
2CL55:
(SEQ ID NO: 1431)
QVQLQESGGGWVQPGDSLRLSCAASGSTFSDYAVGWFRQAPGKEREFVARITRLGNGPYYSASVKGRFTISRD
NARDMAYLKMDALTPEDTATYYCAAGRTLASTHDTKTSPQTYDYWGQGTQVTVSS;
1CL47:
(SEQ ID NO: 1432)
QVQLQESGGGLVQAGGSRRLSCAASGRTFINYAMGWFRQAPGKEREFVAAISTSGSNTYLADSLKARFTISRDN
AKNTVYLQIRSLNPEDTAVYYCAARLSFDDSAYYTSTLRYAYWGQGTQVTVSS;
2CL59:
(SEQ ID NO: 1433)
QVQLQESGGGLVQPGDSLTLSCADSGRTFSNYAMGWFHQAPGKEREFVAAISTSGGSTAYADSVKGRFTISRD
NAKNTVYLQMNNLKPEDTAVYYCAARLSFSGSSYYQGPLQYPYWGQGTQVTVSS;
2CL16:
(SEQ ID NO: 1434)
QVQLQESGGGLVQPGGSLRLSCAASGDTFSNYAMGWFRQAPGKAREFVAAISRSAGSTYHVDSVKGRFTISRD
NAMNTVYLQMNSLQPEDTAHYYCAARLTFNLIDYYTAETRYTYWGQGTQVTVSS;
2CL91:
(SEQ ID NO: 1435)
QVQLQESGGGLVQAGDSLRLSCTASERTFSNYAMGWFRLAPGKERKFVAAISTSGGTTDYVDSVKGRFTISRD
NAKNTVYLQMNSLKPEDTAVYYCAARLDFSSTDLYTTAPRYPYWGQGTQVTVSS;
2CL15:
(SEQ ID NO: 1436)
QVQLQESGGGLVQPGGSVRLSCAASVFTLNNFIMSWVRQAPGKGLERVSDINMVGITDYSDPVKGRFTISRDNK
QNTVYLQGNTLKPEDTAVYFCAAGRPIGLYYPSPRIRDYNDWGQGTQVTVSS;
2CL81:
(SEQ ID NO: 1437)
QVQLQESGGGLVQAGDSLKLSCAASGRTFSTYAMGWFRQAPGKERDVVAAIATNGGTTYYVDSVKGRFTISRD
NAQNRVYLQMNSLKPEDTAIYYCAARLSFGSGYYTNKLNYAYWGQGTQVTVSS;
1CL81:
(SEQ ID NO: 1438)
QVQLQESGGGLVQAGNSLKLSCAASGRNLAYYVMGWFRQAPGREREPVATLTRGGDDTYCADSVKGRFTISS
DNAKNTVYLQMNNLKPEDTAIYTCAARLAVLSSNTYCSGLWDYWGQGTQVTVSS;
1CL56:
(SEQ ID NO: 1439)
QVQLQESGGGLVQPGGSLTLSCGASGFDFSDYVMYWLRQAPGKGLQWVSSINASGVRTYYVDALKGRFTISRD
NAKNTLYLQIDDLKPEDTGLYYCARVGQAPMYFGVDFWGNGTQVTVSS;
2CL40:
(SEQ ID NO: 1440)
QVQLQESGGGLVQTGGSLRVSCAASGRSISNYNMGWFRQPPGKEREIVGSIRWDGDSTYYADSVKGRFTISRD
NTKNTVYLQMNSLKSEDTADYYCAATVSSFDESKNPRWYPYWGQGTQVTVSS;
2CL65:
(SEQ ID NO: 1441)
QVQLQESGGGLVQPGGSLRLSCAASGRIFSINAMGWYRQAPGKQRELVAVISRSGISNYVDSVKGRFTISRDNA
KNTVYLQMNSLNPEDTADYYCNADVLLTFNKREDSWGQGTQVTVSS;
2CL57:
(SEQ ID NO: 1442)
QVQLQESGGGLVQAGGSLKLSCAASGRTFSSYAMGWFRQAPGKERDFVAVISWRNNTYYADSVKGRFTISRD
NAKNTVHLQMNSLKSEDTAVYYCAAAGLGAVVAGMSDYDYWGQGTQVTVSS;
2CL56:
(SEQ ID NO: 1443)
QVQLQESGGGSVQAGDSLTLSCIASGRTFSSLAMGWFRQAPGKEREFVAAINWSGDSTYYSDSMKGRLTMSR
DNAKNTVFLQMNSLEPEDTAVYVCAADASGYGSAWPDRYDYWGQGTQVTVSS;
2CL66:
(SEQ ID NO: 1444)
QVQLQESGGGLVQAGGSLRLSCAASERTFTNYAMGWFRQGPGKDRAFVAAISRSGSSTSYADSVKGRFTISRD
NAENILYLQMNSLKPEDTAVYYCAAAPLVLKTTPGAYNYWGQGTQVTVSS;
2CL34:
(SEQ ID NO: 1445)
QVQLQESGGGLVQAGGSLRLSCAASGRTFTNYAMGWFRQAPGKEREFVATISRSGSMPYYADSVKGRFTISRD
NAKNMVYLQMNSLKPEDTAVYYCAANVLVTTTRLDQYDSWGQGTQVTVSS;
2CL46:
(SEQ ID NO: 1446)
QVQLQESGGGLVQAGGSLRLSCAVSGRTFSSYAMGWFRQARGKEREFVAAVEWSSGSTFYTDSVKGRFAISR
DIAKNTVYLQMNSLKPEDTAVYYCAGDHTGKLVFSKTSDYWGQGTQVTVSS;
2CL29:
(SEQ ID NO: 1447)
QVQLQESGGGLVQPGDSLRLSCTASERTFTNYAMAWFRQAPGKERDVLATISRSGSSTFYAESVKGRFTISRDN
TKNTVYLQMNSLEPEDTAVYYCAARPLVPSEDPDNYNYWGQGTQVTVSS;
1CL88:
(SEQ ID NO: 1448)
QVQLQESGGGLVQAGGSLRLSCAASGRIFSNSAMGWFRQVLGKEREFVAAISENSSILYYTASVKGRFTISRDN
DKNTVYLQMTSLKAEDTAVYYCAGYGSTTIRTTTRPTKWGQGTQVTVSS;
2CL68:
(SEQ ID NO: 1449)
QVQLQESGGGLVQAGDSLRLSCVASGRTLSNYGMGWFRQAPGKGREFVAYISRTGGSTKYENSVKGRFIISRD
TAKNTIYLQMNSLQGEDTAVYYCAFHYNGVYQDSQSYDYWGXGTQVTVSS;
1CL82:
(SEQ ID NO: 1450)
QVQLQESGGGSVQAGDSLRLSCVAPGREISSPAMGWFRQAPGKEREFVATINWSSGATLTADSVKGRFTIFKD
VEKNTVYLQMNSLRPEDTAVYSCAAGATGVFRIARAYSYWGQGTQVTVSS;
and
2CL49:
(SEQ ID NO: 1451)
QVQLQESGGGLMQAGDSLRLSCTVSGRDFANDAVAWFRXPPGKEREFVVGIGSNNGTLTADSVKGRSTIWRD
NIKNTVYLQMSRLTPDDTAVYYCASGPTFFRIARAYPYWGQGTQVTVSS.

[0078] In some embodiments, an “X” at any position of amino acid sequences SEQ ID NOs: 1400-1451 indicates the amino acid at that position is any one of the 20 naturally occurring amino acids can be grouped into the following six standard amino acid groups: (1) hydrophobic: Met, Ala, Val, Leu, Ile; (2) neutral hydrophilic: Cys, Ser, Thr, Asn, Gln; (3) acidic: Asp, Glu; (4) basic: His, Lys, Arg: (5) residues that influence chain orientation: Gly, Pro; and (6) aromatic: Trp, Tyr, Phe.

[0079] In various illustrative embodiments, a human Clec4C binding agent comprises an amino acid sequence selected from the following sequences:

1CL72 revised:
(SEQ ID NO: 1452)
QVQLQESGGGLVQPGESLKLSCAGSGSTFRHHAMAWFRQTPGKEREFVSAI
NDHGDRTKYLDSVRGRFTISRDNTNNMVYLQMSDLRPEDTANYSCAAGPLV
DYLETTPLVYTYWGQGTQVTVSS;
20L25 revised:
(SEQ ID NO: 1453)
QVQLQESGGGSVQAGGSLRLSCAASGRTFSNYAMGWFRQTPGKEREFVATI
SVSGSSTDYADSVKGRFTISRDNAKKTVYLQINSLKTEDTAVYYCAARLSF
DNTALYTSANRYSYWGQGTQVTVSS;
20L68 revised:
(SEQ ID NO: 1454)
QVQLQESGGGLVQAGDSLRLSCVASGRTLSNYGMGWFRQAPGKGREFVAYI
SRTGGSTKYENSVKGRFIISRDTAKNTIYLQMNSLQGEDTAVYYCAFHYNG
VYQDSQSYDYWGQGTQVTVSS;
2CL49 revised:
(SEQ ID NO: 1455)
QVQLQESGGGLMQAGDSLRLSCTVSGRDFANDAVAWFRQPPGKEREFVVGI
GSNNGTLTADSVKGRSTIWRDNIKNTVYLQMSRLTPDDTAVYYCASGPTFF
RIARAYPYWGQGTQVTVSS.

[0080] In various illustrative embodiments, the Clec4C binding agent comprises an amino acid sequence selected from SEQ ID NO: 1400 to SEQ ID NO: 1455 with a terminal histidine tag sequence (i.e., HHHHHH; SEQ ID NO: 327).

[0081] In some embodiments, the Clec4C binding agent comprises an amino acid sequence selected from SEQ ID NO: 1400 to SEQ ID NO: 1455 (provided above) with a HA tag (i.e., YPYDVPDYGS; SEQ ID NO: 328).

[0082] In some embodiments, the Clec4C binding agent comprises an amino acid sequence selected from SEQ ID NO: 1400 to SEQ ID NO: 1455 (provided above) with an AAA linker.

[0083] In some embodiments, the Clec4C binding agent comprises an amino acid sequence selected from SEQ ID NO: 1400 to SEQ ID NO: 1455 (provided above) with an AAA linker, HA tag, and terminal histidine tag sequence (i.e., AAAYPYDVPDYGSHHHHHH; SEQ ID NO: 329).

[0084] In various embodiments, the Clec4C binding agent comprises an amino acid sequence selected from any one of the sequences listed in Table 9 or a sequence of about 90%, or about 93%, or about 95%, or about 97%, or about 98%, or about 99% identity thereto. In some embodiments, the human Clec4C CDR1 sequence is selected from any one of the CDR1 sequences listed in Table 9. In some embodiments, the human Clec4C CDR2 sequence is selected from any one of the CDR2 sequences listed in Table 9. In some embodiments, the human Clec4C CDR3 sequence is selected from any one of the CDR3 sequences listed in Table 9.

[0085] In various embodiments, the present technology contemplates the use of any natural or synthetic analogs, mutants, variants, alleles, homologs and orthologs (herein collectively referred to as “analogs”) of the Clec4C binding agent described herein. In various embodiments, the amino acid sequence of the Clec4C binding agent further includes an amino acid analog, an amino acid derivative, or other non-classical amino acids.

[0086] In various embodiments, the Clec4C binding agent comprises a sequence that is at least 60% identical to any one of the Clec4C sequences disclosed herein. For example, the Clec4C binding agent may comprise a sequence that is at least about 60%, at least about 61%, at least about 62%, at least about 63%, at least about 64%, at least about 65%, at least about 66%, at least about 67%, at least about 68%, at least about 69%, at least about 70%, at least about 71%, at least about 72%, at least about 73%, at least about 74%, at least about 75%, at least about 76%, at least about 77%, at least about 78%, at least about 79%, at least about 80%, at least about 81%, at least about 82%, at least about 83%, at least about 84%, at least about 85%, at least about 86%, at least about 87%, at least about 88%, at least about 89%, at least about 90%, at least about 91%, at least about 92%, at least about 93%, at least about 94%, at least about 95%, at least about 96%, at least about 97%, at least about 98%, at least about 99%, or 100% identical to any of the Clec4C sequences disclosed herein (e.g., about 60%, or about 61%, or about 62%, or about 63%, or about 64%, or about 65%, or about 66%, or about 67%, or about 68%, or about 69%, or about 70%, or about 71%, or about 72%, or about 73%, or about 74%, or about 75%, or about 76%, or about 77%, or about 78%, or about 79%, or about 80%, or about 81%, or about 82%, or about 83%, or about 84%, or about 85%, or about 86%, or about 87%, or about 88%, or about 89%, or about 90%, or about 91%, or about 92%, or about 93%, or about 94%, or about 95%, or about 96%, or about 97%, or about 98%, about 99% or about 100% sequence identity to any one of the Clec4C sequences disclosed herein).

[0087] In various embodiments, the Clec4C binding agent comprising an amino acid sequence having one or more amino acid mutations with respect to any targeting moiety sequence that is known to recognize and bind to Clec4C. In various embodiments, the Clec4C binding agent comprises an amino acid sequence having one, or two, or three, or four, or five, or six, or seen, or eight, or nine, or ten, or fifteen, twenty, thirty, forty, or fifty amino acid mutations with respect to any targeting moiety sequence that is known to recognize and bind to Clec4C. In some embodiments, the one or more amino acid mutations may be independently selected from substitutions, insertions, deletions, and truncations.

[0088] In some embodiments, the amino acid mutations are amino acid substitutions, and may include conservative and/or non-conservative substitutions.

[0089] “Conservative substitutions” may be made, for instance, on the basis of similarity in polarity, charge, size, solubility, hydrophobicity, hydrophilicity, and/or the amphipathic nature of the amino acid residues involved. The 20 naturally occurring amino acids can be grouped into the following six standard amino acid groups: (1) hydrophobic: Met, Ala, Val, Leu, Ile; (2) neutral hydrophilic: Cys, Ser, Thr; Asn, Gln; (3) acidic: Asp, Glu; (4) basic: His, Lys, Arg; (5) residues that influence chain orientation: Gly, Pro; and (6) aromatic: Trp, Tyr, Phe.

[0090] As used herein, “conservative substitutions” are defined as exchanges of an amino acid by another amino acid listed within the same group of the six standard amino acid groups shown above. For example, the exchange of Asp by Glu retains one negative charge in the so modified polypeptide. In addition, glycine and proline may be substituted for one another based on their ability to disrupt a-helices.

[0091] As used herein, “non-conservative substitutions” are defined as exchanges of an amino acid by another amino acid listed in a different group of the six standard amino acid groups (1) to (6) shown above.

[0092] In various embodiments, the substitutions may also include non-classical amino acids. Illustrative non-classical amino acids include, but are not limited to, selenocysteine, pyrrolysine, N-formylmethionine β-alanine, GABA and δ-Aminolevulinic acid, 4-aminobenzoic acid (PABA), D-isomers of the common amino acids, 2,4-diaminobutyric acid, α-amino isobutyric acid, 4-aminobutyric acid, Abu, 2-amino butyric acid, γ-Abu, ε-Ahx, 6-amino hexanoic acid, Aib, 2-amino isobutyric acid, 3-amino propionic acid, ornithine, norleucine, norvaline, hydroxyproline, sarcosme, citrulline, homocitrulline, cysteic acid, t-butylglycine, t-butylalanine, phenylglycine, cyclohexylalanine, β-alanine, fluoro-amino acids, designer amino acids such as β methyl amino acids, C a-methyl amino acids, N α-methyl amino acids, and amino acid analogs in general.

[0093] In various embodiments, the amino acid mutation may be in the CDRs of the targeting moiety (e.g., the CDR1, CDR2 or CDR3 regions). In another embodiment, amino acid alteration may be in the framework regions (FRs) of the targeting moiety (e.g., the FR1, FR2, FR3, or FR4 regions).

[0094] Modification of the amino acid sequences may be achieved using any known technique in the art e.g., site-directed mutagenesis or PCR based mutagenesis. Such techniques are described, for example, in Sambrook et al., Molecular Cloning: A Laboratory Manual, Cold Spring Harbor Press, Plainview, N.Y., 1989 and Ausubel et al., Current Protocols in Molecular Biology, John Wiley & Sons, New York, N.Y., 1989.

[0095] In various embodiments, the mutations do not substantially reduce the Clec4C's capability to specifically recognize and bind to Clec4C. In various embodiments, the mutations do not substantially reduce the Clec4C's capability to specifically bind to Clec4C and without functionally modulating (e.g., partially or fully neutralizing) Clec4C.

[0096] In various embodiments, the binding affinity of the Clec4C binding agent for the full-length and/or mature forms and/or isoforms and/or splice variants and/or fragments and/or monomeric and/or dimeric forms and/or any other naturally occurring or synthetic analogs, variants, or mutants of Clec4C may be described by the equilibrium dissociation constant (K_{D}). In various embodiments, the present Clec4C binding agent comprises a targeting moiety that binds to the full-length and/or mature forms and/or isoforms and/or splice variants and/or fragments and/or any other naturally occurring or synthetic analogs, variants, or mutants (including monomeric and/or dimeric forms) of Clec4C with a K_{D} of less than about 1 μM, about 900 nM, about 800 nM, about 700 nM, about 600 nM, about 500 nM, about 400 nM, about 300 nM, about 200 nM, about 100 nM, about 90 nM, about 80 nM, about 70 nM, about 60 nM, about 50 nM, about 40 nM, about 30 nM, about 20 nM, about 10 nM, or about 5 nM, or about 1 nM.

[0097] In various embodiments, the Clec4C binding agent binds but does not functionally modulate the antigen of interest, i.e., Clec4C. For instance, in various embodiments, the Clec4C binding agent simply targets the antigen but does not substantially functionally modulate (e.g. substantially inhibit, reduce or neutralize) a biological effect that the antigen has. In various embodiments, the Clec4C binding agent binds an epitope that is physically separate from an antigen site that is important for its biological activity (e.g. an antigen's active site).

[0098] Such binding without significant function modulation finds use in various embodiments of the present invention, including methods in which the present Clec4C binding agent is used to directly or indirectly recruit active immune cells to a site of need via an effector antigen. For example, in various embodiments, the present Clec4C binding agent may be used to directly or indirectly recruit dendritic cells via Clec4C to a tumor cell in a method of reducing or eliminating a tumor (e.g. the Clec4C binding agent may comprise a targeting moiety having an anti-Clec4C antigen recognition domain and a targeting moiety having a recognition domain (e.g. antigen recognition domain) directed against a tumor antigen or receptor). In such embodiments, it is desirable to directly or indirectly recruit dendritic cells but not to functionally modulate or neutralize the Clec4C activity. In these embodiments, Clec4C signaling is an important piece of the tumor reducing or eliminating effect.

[0099] In other embodiments, the Clec4C binding agent binds but functionally modulates the antigen of interest, i.e., Clec4C. For instance, in various embodiments, the Clec4C binding agent targets the antigen, i.e., Clec4C, and functionally modulates (e.g. inhibit, reduce or neutralize) a biological effect that the antigen has. Such binding along with functional modulation may find use in various embodiments of the present invention including methods in which the present chimeric protein or chimeric protein complex is used to directly or indirectly recruit active immune cells to a site of need via an effector antigen.

[0100] In some embodiments, the Clec4C binding agent enhances antigen-presentation by dendritic cells. For example, in various embodiments, the present Clec4C binding agent directly or indirectly recruits dendritic cells via Clec4C to a tumor cell, where tumor antigens are subsequently endocytosed and presented on the dendritic cell for induction of potent humoral and cytotoxic T cell responses.

[0101] In embodiments (for example, related to treating autoimmune or neurodegenerative disease), the Clec4C binding agent comprises a targeting moiety that binds and neutralizes the antigen of interest, i.e., Clec4C. For instance, in various embodiments, the present methods may inhibit or reduce Clec4C signaling or expression, e.g. to cause a reduction in an immune response.

[0102] In embodiments, e.g. relating to autoimmunity, the Clec4C binding agent delivers a tolerogenic signal to reduce an immune response.

### Therapeutic Agents Comprising the Present Clec4C Binding Agents

Chimeras and Fusions with Signaling Agents

[0103] In various embodiments, the Clec4C binding agent of the present invention is part of a chimera or fusion with one or more signaling agents. Accordingly, the present invention provides for chimeric or fusion proteins that include, for example, a targeting moiety against Clec4C and one or more signaling agents.

[0104] In various embodiments, the signaling agent is modified to have reduced affinity or activity for one or more of its receptors, which allows for attenuation of activity (inclusive of agonism or antagonism) and/or prevents non-specific signaling or undesirable sequestration of the chimeric or fusion protein. In various embodiments, the signaling agent is antagonistic in its wild type form and bears one or more mutations that attenuate its antagonistic activity. In various embodiments, the signaling agent is antagonistic due to one or more mutations, e.g. an agonistic signaling agent is converted to an antagonistic signaling agent and, such a converted signaling agent, optionally, also bears one or more mutations that attenuate its antagonistic activity (e.g. as described in WO 2015/007520, the entire contents of which are hereby incorporated by reference).

[0105] Accordingly, in various embodiments, the signaling agent is a modified (e.g. mutant) form of the signaling agent having one or more mutations. In various embodiments, the modifications (e.g. mutations) allow for the modified signaling agent to have one or more of attenuated activity such as one or more of reduced binding affinity, reduced endogenous activity, and reduced specific bioactivity relative to unmodified or unmutated, i.e. the wild type form of the signaling agent (e.g. comparing the same signaling agent in a wild type form versus a modified or mutant form). In some embodiments, the mutations which attenuate or reduce binding or affinity include those mutations which substantially reduce or ablate binding or activity. In some embodiments, the mutations which attenuate or reduce binding or affinity are different than those mutations which substantially reduce or ablate binding or activity. Consequentially, in various embodiments, the mutations allow for the signaling agent to have improved safety, e.g. reduced systemic toxicity, reduced side effects, and reduced off-target effects relative to unmutated, i.e. wild type, signaling agent (e.g. comparing the same signaling agent in a wild type form versus a modified (e.g. mutant) form).

[0106] As described herein, the agent may have improved safety due to one of more modifications, e.g. mutations. In various embodiments, improved safety means that the present chimeric protein or chimeric protein complex provides lower toxicity (e.g. systemic toxicity and/or tissue/organ-associated toxicities); and/or lessened or substantially eliminated side effects; and/or increased tolerability, lessened or substantially eliminated adverse events; and/or reduced or substantially eliminated off-target effects; and/or an increased therapeutic window.

[0107] In various embodiments, the signaling agent is modified to have one or more mutations that reduce its binding affinity or activity for one or more of its receptors. In some embodiments, the signaling agent is modified to have one or more mutations that substantially reduce or ablate binding affinity or activity for the receptors. In some embodiments, the activity provided by the wild type signaling agent is agonism at the receptor (e.g. activation of a cellular effect at a site of therapy). For example, the wild type signaling agent may activate its receptor. In such embodiments, the mutations result in the modified signaling agent to have reduced or ablated activating activity at the receptor. For example, the mutations may result in the modified signaling agent to deliver a reduced activating signal to a target cell or the activating signal could be ablated. In some embodiments, the activity provided by the wild type signaling agent is antagonism at the receptor (e.g. blocking or dampening of a cellular effect at a site of therapy). For example, the wild type signaling agent may antagonize or inhibit the receptor. In these embodiments, the mutations result in the modified signaling agent to have a reduced or ablated antagonizing activity at the receptor. For example, the mutations may result in the modified signaling agent to deliver a reduced inhibitory signal to a target cell or the inhibitory signal could be ablated. In various embodiments, the signaling agent is antagonistic due to one or more mutations, e.g. an agonistic signaling agent is converted to an antagonistic signaling agent (e.g. as described in WO 2015/007520, the entire contents of which are hereby incorporated by reference) and, such a converted signaling agent, optionally, also bears one or more mutations that reduce its binding affinity or activity for one or more of its receptors or that substantially reduce or ablate binding affinity or activity for one or more of its receptors.

[0108] In some embodiments, the reduced affinity or activity at the receptor is restorable by attachment with one or more of the targeting moieties as described herein (e.g., targeting moiety against Clec4C or any other targeting moiety described herein). In other embodiments, the reduced affinity or activity at the receptor is not substantially restorable by the activity of one or more of the targeting moieties.

[0109] In various embodiments, the chimeric proteins or chimeric protein complexes of the present invention reduce off-target effects because their signaling agents have mutations that weaken or ablate binding affinity or activity at a receptor. In various embodiments, this reduction in side effects is observed relative with, for example, the wild type signaling agents. In various embodiments, the signaling agent is active on target cells because the targeting moiety(ies) compensates for the missing/insufficient binding (e.g., without limitation and/or avidity) required for substantial activation. In various embodiments, the modified signaling agent is substantially inactive en route to the site of therapeutic activity and has its effect substantially on specifically targeted cell types which greatly reduces undesired side effects.

[0110] In some embodiments, the signaling agent may include one or more mutations that attenuate or reduce binding or affinity for one receptor (i.e., a therapeutic receptor) and one or more mutations that substantially reduce or ablate binding or activity at a second receptor. In such embodiments, these mutations may be at the same or at different positions (i.e., the same mutation or multiple mutations). In some embodiments, the mutation(s) that reduce binding and/or activity at one receptor is different than the mutation(s) that substantially reduce or ablate at another receptor. In some embodiments, the mutation(s) that reduce binding and/or activity at one receptor is the same as the mutation(s) that substantially reduce or ablate at another receptor. In some embodiments, the present chimeric proteins or chimeric protein complexes have a modified signaling agent that has both mutations that attenuate binding and/or activity at a therapeutic receptor and therefore allow for a more controlled, on-target therapeutic effect (e.g. relative wild type signaling agent) and mutations that substantially reduce or ablate binding and/or activity at another receptor and therefore reduce side effects (e.g. relative to wild type signaling agent).

[0111] In some embodiments, the substantial reduction or ablation of binding or activity is not substantially restorable with a targeting moiety (e.g., a targeting moiety against Clec4C or any other targeting moiety described herein). In some embodiments, the substantial reduction or ablation of binding or activity is restorable with a targeting moiety. In various embodiments, substantially reducing or ablating binding or activity at a second receptor also may prevent deleterious effects that are mediated by the other receptor. Alternatively, or in addition, substantially reducing or ablating binding or activity at the other receptor causes the therapeutic effect to improve as there is a reduced or eliminated sequestration of the therapeutic chimeric proteins or chimeric protein complexes away from the site of therapeutic action. For instance, in some embodiments, this obviates the need of high doses of the present chimeric proteins or chimeric protein complexes that compensate for loss at the other receptor. Such ability to reduce dose further provides a lower likelihood of side effects.

[0112] In various embodiments, the modified signaling agent comprises one or more mutations that cause the signaling agent to have reduced, substantially reduced, or ablated affinity, e.g. binding (e.g. K_{D}) and/or activation (for instance, when the modified signaling agent is an agonist of its receptor, measurable as, for example, K_{A} and/or EC₅₀) and/or inhibition (for instance, when the modified signaling agent is an antagonist of its receptor, measurable as, for example, K_{I} and/or IC₅₀), for one or more of its receptors. In various embodiments, the reduced affinity at the signaling agent's receptor allows for attenuation of activity (inclusive of agonism or antagonism). In such embodiments, the modified signaling agent has about 1%, or about 3%, about 5%, about 10%, about 15%, about 20%, about 25%, about 30%, about 35%, about 40%, about 45%, about 50%, about 60%, about 65%, about 70%, about 75%, about 80%, about 85%, about 90%, about 95%, or about 10%-20%, about 20%-40%, about 50%, about 40%-60%, about 60%-80%, about 80%-100% of the affinity for the receptor relative to the wild type signaling agent. In some embodiments, the binding affinity is at least about 2-fold lower, about 3-fold lower, about 4-fold lower, about 5-fold lower, about 6-fold lower, about 7-fold lower, about 8-fold lower, about 9-fold lower, at least about 10-fold lower, at least about 15-fold lower, at least about 20-fold lower, at least about 25-fold lower, at least about 30-fold lower, at least about 35-fold lower, at least about 40-fold lower, at least about 45-fold lower, at least about 50-fold lower, at least about 100-fold lower, at least about 150-fold lower, or about 10-50-fold lower, about 50-100-fold lower, about 100-150-fold lower, about 150-200-fold lower, or more than 200-fold lower relative to the wild type signaling agent.

[0113] In embodiments, the chimeric protein or chimeric protein complex comprises a modified signaling agent having mutations that reduce binding at one receptor and substantially reduce or ablate binding at a second receptor, the attenuation or reduction in binding affinity of the modified signaling agent for one receptor is less than the substantial reduction or ablation in affinity for the other receptor. In some embodiments, the attenuation or reduction in binding affinity of the modified signaling agent for one receptor is less than the substantial reduction or ablation in affinity for the other receptor by about 1%, or about 3%, about 5%, about 10%, about 15%, about 20%, about 25%, about 30%, about 35%, about 40%, about 45%, about 50%, about 60%, about 65%, about 70%, about 75%, about 80%, about 85%, about 90%, or about 95%. In various embodiments, substantial reduction or ablation refers to a greater reduction in binding affinity and/or activity than attenuation or reduction.

[0114] In various embodiments, the modified signaling agent comprises one or more mutations that reduce the endogenous activity of the signaling agent to about 75%, or about 70%, or about 60%, or about 50%, or about 40%, or about 30%, or about 25%, or about 20%, or about 10%, or about 5%, or about 3%, or about 1%, e.g., relative to the wild type signaling agent.

[0115] In some embodiments, the modified signaling agent comprises one or more mutations that cause the signaling agent to have reduced affinity for its receptor that is lower than the binding affinity of the targeting moiety (ies) for its (their) receptor(s). In some embodiments, this binding affinity differential is between signaling agent/receptor and targeting moiety/receptor on the same cell. In some embodiments, this binding affinity differential allows for the signaling agent, e.g. mutated signaling agent, to have localized, on-target effects and to minimize off-target effects that underlie side effects that are observed with wild type signaling agent. In some embodiments, this binding affinity is at least about 2-fold, or at least about 5-fold, or at least about 10-fold, or at least about 15-fold lower, or at least about 25-fold, or at least about 50-fold lower, or at least about 100-fold, or at least about 150-fold.

[0116] Receptor binding activity may be measured using methods known in the art. For example, affinity and/or binding activity may be assessed by Scatchard plot analysis and computer-fitting of binding data (e.g. Scatchard, 1949) or by reflectometric interference spectroscopy under flow through conditions, as described by Brecht et al. (1993), the entire contents of all of which are hereby incorporated by reference.

[0117] In various embodiments, the signaling agent is an immune-modulating agent, e.g. one or more of an interleukin, interferon, and tumor necrosis factor.

[0118] In some embodiments, the signaling agent is an interleukin or a modified interleukin, including for example IL-1; IL-2; IL-3; IL-4; IL-5; IL-6; IL-7; IL-8; IL-9; IL-10; IL-11; IL-12; IL-13; IL-14; IL-15; IL-16; IL-17; IL-18; IL-19; IL- 20; IL-21; IL-22; IL-23; IL-24; IL-25; IL-26; IL-27; IL-28; IL-29; IL-30; IL-31; IL-32; IL-33; IL-35; IL-36 or a fragment, variant, analogue, or family-member thereof. Interleukins are a group of multi-functional cytokines synthesized by lymphocytes, monocytes, and macrophages. Known functions include stimulating proliferation of immune cells (e.g., T helper cells, B cells, eosinophils, and lymphocytes), chemotaxis of neutrophils and T lymphocytes, and/or inhibition of interferons. Interleukin activity can be determined using assays known in the art: Matthews et al., in Lymphokines and Interferons: A Practical Approach, Clemens et al., eds, IRL Press, Washington, D.C. 1987, pp. 221-225; and Orencole & Dinarello (1989) Cytokine 1, 14-20.

[0119] In some embodiments, the signaling agent is an interferon or a modified version of an interferon such as interferon types I, II, and III. Illustrative interferons, including for example, interferon-α-1, 2, 4, 5, 6, 7, 8, 10, 13, 14, 16, 17, and 21, interferon-β and interferon-γ, interferon κ, interferon ε, interferon τ, and interferon ω̅.

[0120] In some embodiments, the signaling agent is a tumor necrosis factor (TNF) or a modified version of a tumor necrosis factor (TNF) or a protein in the TNF family, including but not limited to, TNF-α, TNF-β, LT-B, CD40L, CD27L, CD30L, FASL, 4-1BBL, OX40L, and TRAIL.

[0121] The amino acid sequences of the wild type signaling agents described herein are well known in the art. Accordingly, in various embodiments the modified signaling agent comprises an amino acid sequence that has at least about 60%, or at least about 61%, or at least about 62%, or at least about 63%, or at least about 64%, or at least about 65%, or at least about 66%, or at least about 67%, or at least about 68%, or at least about 69%, or at least about 70%, or at least about 71%, or at least about 72%, or at least about 73%, or at least about 74%, or at least about 75%, or at least about 76%, or at least about 77%, or at least about 78%, or at least about 79%, or at least about 80%, or at least about 81%, or at least about 82%, or at least about 83%, or at least about 84%, or at least about 85%, or at least about 86%, or at least about 87%, or at least about 88%, or at least about 89%, or at least about 90%, or at least about 91%, or at least about 92%, or at least about 93%, or at least about 94%, or at least about 95%, or at least about 96%, or at least about 97%, or at least about 98%, or at least about 99% sequence identity with the known wild type amino acid sequences of the signaling agents described herein (e.g. about 60%, or about 61%, or about 62%, or about 63%, or about 64%, or about 65%, or about 66%, or about 67%, or about 68%, or about 69%, or about 70%, or about 71%, or about 72%, or about 73%, or about 74%, or about 75%, or about 76%, or about 77%, or about 78%, or about 79%, or about 80%, or about 81%, or about 82%, or about 83%, or about 84%, or about 85%, or about 86%, or about 87%, or about 88%, or about 89%, or about 90%, or about 91%, or about 92%, or about 93%, or about 94%, or about 95%, or about 96%, or about 97%, or about 98%, or about 99% sequence identity).

[0122] In various embodiments the modified signaling agent comprises an amino acid sequence that has at least about 60%, or at least about 61%, or at least about 62%, or at least about 63%, or at least about 64%, or at least about 65%, or at least about 66%, or at least about 67%, or at least about 68%, or at least about 69%, or at least about 70%, or at least about 71%, or at least about 72%, or at least about 73%, or at least about 74%, or at least about 75%, or at least about 76%, or at least about 77%, or at least about 78%, or at least about 79%, or at least about 80%, or at least about 81%, or at least about 82%, or at least about 83%, or at least about 84%, or at least about 85%, or at least about 86%, or at least about 87%, or at least about 88%, or at least about 89%, or at least about 90%, or at least about 91%, or at least about 92%, or at least about 93%, or at least about 94%, or at least about 95%, or at least about 96%, or at least about 97%, or at least about 98%, or at least about 99% sequence identity with any amino acid sequences of the signaling agents described herein (e.g. about 60%, or about 61%, or about 62%, or about 63%, or about 64%, or about 65%, or about 66%, or about 67%, or about 68%, or about 69%, or about 70%, or about 71%, or about 72%, or about 73%, or about 74%, or about 75%, or about 76%, or about 77%, or about 78%, or about 79%, or about 80%, or about 81%, or about 82%, or about 83%, or about 84%, or about 85%, or about 86%, or about 87%, or about 88%, or about 89%, or about 90%, or about 91%, or about 92%, or about 93%, or about 94%, or about 95%, or about 96%, or about 97%, or about 98%, or about 99% sequence identity).

[0123] In various embodiments, the modified signaling agent comprises an amino acid sequence having one or more amino acid mutations. In some embodiments, the one or more amino acid mutations may be independently selected from substitutions, insertions, deletions, and truncations. In some embodiments, the amino acid mutations are amino acid substitutions, and may include conservative and/or non-conservative substitutions, as described elsewhere herein.

[0124] In various embodiments, the substitutions may also include non-classical amino acids as described elsewhere herein.

[0125] As described herein, the modified signaling agents bear mutations that affect affinity and/or activity at one or more receptors. In various embodiments, there is reduced affinity and/or activity at a therapeutic receptor, e.g. a receptor through which a desired therapeutic effect is mediated (e.g. agonism or antagonism). In various embodiments, the modified signaling agents bear mutations that substantially reduce or ablate affinity and/or activity at a receptor, e.g. a receptor through which a desired therapeutic effect is not mediated (e.g. as the result of promiscuity of binding). The receptors of any signaling agents, as described herein, are known in the art.

[0126] Illustrative mutations which provide reduced affinity and/or activity (e.g. agonistic) at a receptor are found in WO 2013/107791 and PCT/EP2017/061544 (e.g. with regard to interferons), WO 2015/007542 (e.g. with regard to interleukins), and WO 2015/007903 (e.g. with regard to TNF), the entire contents of each of which are hereby incorporated by reference. Illustrative mutations which provide reduced affinity and/or activity (e.g. antagonistic) at a therapeutic receptor are found in WO 2015/007520, the entire contents of which are hereby incorporated by reference.

[0127] In some embodiments, the modified signaling agent comprises one or more mutations that cause the signaling agent to have reduced affinity and/or activity for a type I cytokine receptor, a type II cytokine receptor, a chemokine receptor, a receptor in the Tumor Necrosis Factor Receptor (TNFR) superfamily, TGF-beta Receptors, a receptor in the immunoglobulin (Ig) superfamily, and/or a receptor in the tyrosine kinase superfamily.

[0128] In various embodiments, the receptor for the signaling agent is a Type I cytokine receptor. Type I cytokine receptors are known in the art and include, but are not limited to receptors for IL2 (beta-subunit), IL3, IL4, IL5, IL6, IL7, IL9, IL11, IL12, GM-CSF, G-CSF, LIF, CNTF, and also the receptors for Thrombopoietin (TPO), Prolactin, and Growth hormone. Illustrative type I cytokine receptors include, but are not limited to, GM-CSF receptor, G-CSF receptor, LIF receptor, CNTF receptor, TPO receptor, and type I IL receptors.

[0129] In various embodiments, the receptor for the signaling agent is a Type II cytokine receptor. Type II cytokine receptors are multimeric receptors composed of heterologous subunits and are receptors mainly for interferons. This family of receptors includes, but is not limited to, receptors for interferon-a, interferon-β and interferon-γ, IL10, IL22, and tissue factor. Illustrative type II cytokine receptors include, but are not limited to, IFN-α receptor (e.g. IFNAR1 and IFNAR2), IFN-β receptor, IFN-γ receptor (e.g. IFNGR1 and IFNGR2), and type II IL receptors.

[0130] In various embodiments, the receptor for the signaling agent is a G protein-coupled receptor. Chemokine receptors are G protein-coupled receptors with seven transmembrane structure and coupled to G-protein for signal transduction. Chemokine receptors include, but are not limited to, CC chemokine receptors, CXC chemokine receptors, CX3C chemokine receptors, and XC chemokine receptor (XCR1). Illustrative chemokine receptors include, but are not limited to, CCR1, CCR2, CCR3, CCR4, CCR5, CCR6, CCR7, CCR8, CCR9, CCR10, CXCR1, CXCR2, CXCR3, CXCR3B, CXCR4, CXCR5, CSCR6, CXCR7, XCR1, and CX3CR1.

[0131] In various embodiments, the receptor for the signaling agent is a TNFR family member. Tumor necrosis factor receptor (TNFR) family members share a cysteine-rich domain (CRD) formed of three disulfide bonds surrounding a core motif of CXXCXXC creating an elongated molecule. Illustrative tumor necrosis factor receptor family members include: CDI 20a (TNFRSFIA), CD 120b (TNFRSFIB), Lymphotoxin beta receptor (LTBR, TNFRSF3), CD 134 (TNFRSF4), CD40 (CD40, TNFRSF5), FAS (FAS, TNFRSF6), TNFRSF6B (TNFRSF6B), CD27 (CD27, TNFRSF7), CD30 (TNFRSF8), CD137 (TNFRSF9), TNFRSFIOA(TNFRSFIOA), TNFRSFIOB, (TNFRSFIOB), TNFRSFIOC (TNFRSFIOC), TNFRSFIOD (TNFRSFIOD), RANK (TNFRSFI IA), Osteoprotegerin (TNFRSFI IB), TNFRSF12A(TNFRSF12A), TNFRSF13B (TNFRSF13B), TNFRSF13C (TNFRSF13C), TNFRSF14 (TNFRSF14), Nerve growth factor receptor (NGFR, TNFRSF16), TNFRSF17 (TNFRSF17), TNFRSF18 (TNFRSF18), TNFRSF19 (TNFRSF19), TNFRSF21 (TNFRSF21), and TNFRSF25 (TNFRSF25). In an embodiment, the TNFR family member is CD120a (TNFRSF1A) or TNF-R1. In another embodiment, the TNFR family member is CD 120b (TNFRSFIB) or TNF-R2.

[0132] In various embodiments, the receptor for the signaling agent is a TGF-beta receptor. TGF-beta receptors are single pass serine/threonine kinase receptors. TGF-beta receptors include, but are not limited to, TGFBR1, TGFBR2, and TGFBR3.

[0133] In various embodiments, the receptor for the signaling agent is an Ig superfamily receptor. Receptors in the immunoglobulin (Ig) superfamily share structural homology with immunoglobulins. Receptors in the Ig superfamily include, but are not limited to, interleukin-1 receptors, CSF-1R, PDGFR (e.g. PDGFRA and PDGFRB), and SCFR.

[0134] In various embodiments, the receptor for the signaling agent is a tyrosine kinase superfamily receptor. Receptors in the tyrosine kinase superfamily are well known in the art. There are about 58 known receptor tyrosine kinases (RTKs), grouped into 20 subfamilies. Receptors in the tyrosine kinase superfamily include, but are not limited to, FGF receptors and their various isoforms such as FGFR1, FGFR2, FGFR3, FGFR4, and FGFR5.

[0135] In some embodiments, the modified signaling agent is interferon α. In such embodiments, the modified IFN-α agent has reduced affinity and/or activity for the IFN-α/B receptor (IFNAR), i.e., IFNAR1 and/or IFNAR2 chains. In some embodiments, the modified IFN-α agent has substantially reduced or ablated affinity and/or activity for the IFN-α/B receptor (IFNAR), i.e., IFNAR1 and/or IFNAR2 chains.

[0136] Mutant forms of interferon α are known to the person skilled in the art. In an illustrative embodiment, the modified signaling agent is the allelic form IFN-α2a having the amino acid sequence of SEQ ID NO: 46.

[0137] In an illustrative embodiment, the modified signaling agent is the allelic form IFN-2b having the amino acid sequence of SEQ ID NO: 47 (which differs from IFN-α2a at amino acid position 23).

[0138] In some embodiments, said IFN-α2 mutant (IFN-α2a or IFN-α2b) is mutated at one or more amino acids at positions 144-154, such as amino acid positions 148, 149 and/or 153. In some embodiments, the IFN-α2 mutant comprises one or more mutations selected from L153A, R149A, and M148A. Such mutants are described, for example, in WO2013/107791 and Piehler et al., (2000) J. Biol. Chem, 275:40425-33, the entire contents of all of which are hereby incorporated by reference.

[0139] In some embodiments, the IFN-α2 mutants have reduced affinity and/or activity for IFNAR1. In some embodiments, the IFN-α2 mutant comprises one or more mutations selected from F64A, N65A, T69A, L80A, Y85A, and Y89A, as described in WO2010/030671, the entire contents of which is hereby incorporated by reference.

[0140] In some embodiments, the IFN-α2 mutant comprises one or more mutations selected from K133A, R144A, R149A, and L153A as described in WO2008/124086, the entire contents of which is hereby incorporated by reference.

[0141] In some embodiments, the IFN-α2 mutant comprises one or more mutations selected from R120E and R120E/K121E, as described in WO2015/007520 and WO2010/030671, the entire contents of which are hereby incorporated by reference. In such embodiments, said IFN-α2 mutant antagonizes wildtype IFN-α2 activity. In such embodiments, said mutant IFN-α2 has reduced affinity and/or activity for IFNAR1 while affinity and/or activity of IFNR2 is retained.

[0142] In some embodiments, the human IFN-α2 mutant comprises (1) one or more mutations selected from R120E and R120E/K121E, which, without wishing to be bound by theory, create an antagonistic effect and (2) one or more mutations selected from K133A, R144A, R149A, and L153A, which, without wishing to be bound by theory, allow for an attenuated effect at, for example, IFNAR2. In an embodiment, the human IFN-α2 mutant comprises R120E and L153A.

[0143] In some embodiments, the human IFN-α2 mutant comprises one or more mutations selected from, L15A, A19W, R22A, R23A, L26A, F27A, L30A, L30V, K31A, D32A, R33K, R33A, R33Q, H34A, D35A, Q40A, D114R, L117A, R120A, R125A, K134A, R144A, A145G, A145M, M148A, R149A, S152A, L153A, and N156A as disclosed in WO 2013/059885, the entire disclosures of which are hereby incorporated by reference. In some embodiments, the human IFN-α2 mutant comprises the mutations H57Y, E58N, Q61S, and/or L30A as disclosed in WO 2013/059885. In some embodiments, the human IFN-α2 mutant comprises the mutations H57Y, E58N, Q61S, and/or R33A as disclosed in WO 2013/059885. In some embodiments, the human IFN-α2 mutant comprises the mutations H57Y, E58N, Q61S, and/or M148A as disclosed in WO 2013/059885. In some embodiments, the human IFN-α2 mutant comprises the mutations H57Y, E58N, Q61S, and/or L153A as disclosed in WO 2013/059885. In some embodiments, the human IFN-α2 mutant comprises the mutations N65A, L80A, Y85A, and/or Y89A as disclosed in WO 2013/059885. In some embodiments, the human IFN-α2 mutant comprises the mutations N65A, L80A, Y85A, Y89A, and/or D114A as disclosed in WO 2013/059885. In some embodiments, the human IFN-α2 mutant comprises one or more mutations selected from R144X₁, A145X₂, and R33A, wherein X₁ is selected from A, S, T, Y, L, and I, and wherein X₂ is selected from G, H, Y, K, and D.

[0144] In some embodiments, the human IFN-α2 mutant comprises one or more mutations that was for aglycosylation, e.g. in which the amino acid residue at position 106 (T) is substituted with a member of the group of A, C, D, E, F, G, H, I, K, L, M, N, P, Q, R, S, V, W and Y. In some embodiments, the human IFN-α2 mutant comprises a T106A mutation. In various embodiments, the mutation at position 106 is in addition to the other IFN-α2 mutations described herein.

[0145] In some embodiments, the modified signaling agent is interferon β. In such embodiments, the modified interferon β agent has reduced affinity and/or activity for the IFN-α/B receptor (IFNAR), i.e., IFNAR1 and/or IFNAR2 chains. In some embodiments, the modified interferon β agent has substantially reduced or ablated affinity and/or activity for the IFN-α/B receptor (IFNAR), i.e., IFNAR1 and/or IFNAR2 chains.

[0146] In an embodiment, the modified signaling agent is interferon β. In such embodiments, the modified interferon β agent has reduced affinity and/or activity for the IFN-α/B receptor (IFNAR), i.e., IFNAR1 and/or IFNAR2 chains. In some embodiments, the modified interferon β agent has substantially reduced or ablated affinity and/or activity for the IFN-α/B receptor (IFNAR), i.e., IFNAR1 and/or IFNAR2 chains.

[0147] In an illustrative embodiment, the modified signaling agent is IFN-β. In various embodiments, the IFN-β encompasses functional derivatives, analogs, precursors, isoforms, splice variants, or fragments of IFN-β. In various embodiments, the IFN-β encompasses IFN-β derived from any species. In an embodiment, the chimeric protein or chimeric protein complex comprises a modified version of mouse IFN-β. In another embodiment, the chimeric protein or chimeric protein complex comprises a modified version of human IFN-β. Human IFN-β is a polypeptide with a molecular weight of about 22 kDa comprising 166 amino acid residues. The amino acid sequence of human IFN-β is SEQ ID NO: 48.

[0148] In some embodiments, the human IFN-β is IFN-β-1a which is a glycosylated form of human IFN-β. In some embodiments, the human IFN-β is IFN-β-1b which is a non-glycosylated form of human IFN-β that has a Met-1 deletion and a Cys-17 to Ser mutation.

[0149] In various embodiments, the modified IFN-β has one or more mutations that reduce its binding to or its affinity for the IFNAR1 subunit of IFNAR. In one embodiment, the modified IFN-β has reduced affinity and/or activity at IFNAR1. In various embodiments, the modified IFN-β is human IFN-β and has one or more mutations at positions F67, R71, L88, Y92, 195, N96, K123, and R124. In some embodiments, the one or more mutations are substitutions selected from F67G, F67S, R71A, L88G, L88S, Y92G, Y92S, 195A, N96G, K123G, and R124G. In an embodiment, the modified IFN-β comprises the F67G mutation. In an embodiment, the modified IFN-β comprises the K123G mutation. In an embodiment, the modified IFN-β comprises the F67G and R71A mutations. In an embodiment, the modified IFN-β comprises the L88G and Y92G mutations. In an embodiment, the modified IFN-β comprises the Y92G, 195A, and N96G mutations. In an embodiment, the modified IFN-comprises the K123G and R124G mutations. In an embodiment, the modified IFN-β comprises the F67G, L88G, and Y92G mutations. In an embodiment, the modified IFN-β comprises the F67S, L88S, and Y92S mutations.

[0150] In some embodiments, the modified IFN-β has one or more mutations that reduce its binding to or its affinity for the IFNAR2 subunit of IFNAR. In one embodiment, the modified IFN-β has reduced affinity and/or activity at IFNAR2. In various embodiments, the modified IFN-β is human IFN-β and has one or more mutations at positions W22, R27, L32, R35, V148, L151, R152, and Y155. In some embodiments, the one or more mutations are substitutions selected from W22G, R27G, L32A, L32G, R35A, R35G, V148G, L151G, R152A, R152G, and Y155G. In an embodiment, the modified IFN-β comprises the W22G mutation. In an embodiment, the modified IFN-β comprises the L32A mutation. In an embodiment, the modified IFN-β comprises the L32G mutation. In an embodiment, the modified IFN-β comprises the R35A mutation. In an embodiment, the modified IFN-β comprises the R35G mutation. In an embodiment, the modified IFN-β comprises the V148G mutation. In an embodiment, the modified IFN-β comprises the R152A mutation. In an embodiment, the modified IFN-β comprises the R152G mutation. In an embodiment, the modified IFN-β comprises the Y155G mutation. In an embodiment, the modified IFN-β comprises the W22G and R27G mutations. In an embodiment, the modified IFN-β comprises the L32A and R35A mutation. In an embodiment, the modified IFN-β comprises the L151G and R152A mutations. In an embodiment, the modified IFN-β comprises the V148G and R152A mutations.

[0151] In some embodiments, the modified IFN-β has one or more of the following mutations: R35A, R35T, E42K, M621, G78S, A141Y, A142T, E149K, and R152H. In some embodiments, the modified IFN-β has one or more of the following mutations: R35A, R35T, E42K, M621, G78S, A141Y, A142T, E149K, and R152H in combination with C17S or C17A.

[0152] In some embodiments, the modified IFN-β has one or more of the following mutations: R35A, R35T, E42K, M621, G78S, A141Y, A142T, E149K, and R152H in combination with any of the other IFN-β mutations described herein.

[0153] The crystal structure of human IFN-β is known and is described in Karpusas et al., (1998) PNAS, 94 (22): 11813-11818. Specifically, the structure of human IFN-β has been shown to include five a-helices (i.e., A, B, C, D, and E) and four loop regions that connect these helices (i.e., AB, BC, CD, and DE loops). In various embodiments, the modified IFN-β has one or more mutations in the A, B, C, D, E helices and/or the AB, BC, CD, and DE loops which reduce its binding affinity or activity at a therapeutic receptor such as IFNAR. Illustrative mutations are described in WO2000/023114 and US20150011732, the entire contents of which are hereby incorporated by reference. In an illustrative embodiment, the modified IFN-β is human IFN-β comprising alanine substitutions at amino acid positions 15, 16, 18, 19, 22, and/or 23. In an illustrative embodiment, the modified IFN-β is human IFN-β comprising alanine substitutions at amino acid positions 28-30, 32, and 33. In an illustrative embodiment, the modified IFN-β is human IFN-comprising alanine substitutions at amino acid positions 36, 37, 39, and 42. In an illustrative embodiment, the modified IFN-β is human IFN-β comprising alanine substitutions at amino acid positions 64 and 67 and a serine substitution at position 68. In an illustrative embodiment, the modified IFN-β is human IFN-β comprising alanine substitutions at amino acid positions 71-73. In an illustrative embodiment, the modified IFN-β is human IFN-β comprising alanine substitutions at amino acid positions 92, 96, 99, and 100. In an illustrative embodiment, the modified IFN-β is human IFN-β comprising alanine substitutions at amino acid positions 128, 130, 131, and 134. In an illustrative embodiment, the modified IFN-β is human IFN-β comprising alanine substitutions at amino acid positions 149, 153, 156, and 159. In some embodiments, the mutant IFNβ comprises SEQ ID NO:48 and a mutation at W22, the mutation being an aliphatic hydrophobic residue selected from glycine (G), alanine (A), leucine (L), isoleucine (I), methionine (M), and valine (V).

[0154] In some embodiments, the mutant IFNB comprises SEQ ID NO: 48 and a mutation at R27, the mutation being an aliphatic hydrophobic residue selected from glycine (G), alanine (A), leucine (L), isoleucine (I), methionine (M), and valine (V).

[0155] In some embodiments, the mutant IFNβ comprises SEQ ID NO:48 and a mutation at W22, the mutation being an aliphatic hydrophobic residue selected from glycine (G), alanine (A), leucine (L), isoleucine (I), methionine (M), and valine (V) and a mutation at R27, the mutation being an aliphatic hydrophobic residue selected from glycine (G), alanine (A), leucine (L), isoleucine (I), methionine (M), and valine (V).

[0156] In some embodiments, the mutant IFNβ comprises SEQ ID NO: 48 and a mutation at L32, the mutation being an aliphatic hydrophobic residue selected from glycine (G), alanine (A), isoleucine (I), methionine (M), and valine (V). In some embodiments, the mutant IFNβ comprises SEQ ID NO: 48 and a mutation at R35, the mutation being an aliphatic hydrophobic residue selected from glycine (G), alanine (A), leucine (L), isoleucine (I), methionine (M), and valine (V).

[0157] In some embodiments, the mutant IFNβ comprises SEQ ID NO: 48 and a mutation at L32, the mutation being an aliphatic hydrophobic residue selected from glycine (G), alanine (A), isoleucine (I), methionine (M), and valine (V) and a mutation at R35, the mutation being an aliphatic hydrophobic residue selected from glycine (G), alanine (A), leucine (L), isoleucine (I), methionine (M), and valine (V).

[0158] In some embodiments, the mutant IFNβ comprises SEQ ID NO: 48 and a mutation at F67, the mutation being an aliphatic hydrophobic residue selected from glycine (G), alanine (A), leucine (L), isoleucine (I), methionine (M), and valine (V).

[0159] In some embodiments, the mutant IFNβ comprises SEQ ID NO: 48 and a mutation at R71, the mutation being an aliphatic hydrophobic residue selected from glycine (G), alanine (A), leucine (L), isoleucine (I), methionine (M), and valine (V).

[0160] In some embodiments, the mutant IFNβ comprises SEQ ID NO: 48 and a mutation at F67, the mutation being an aliphatic hydrophobic residue selected from glycine (G), alanine (A), leucine (L), isoleucine (I), methionine (M), and valine (V) and a mutation at R71, the mutation being an aliphatic hydrophobic residue selected from glycine (G), alanine (A), leucine (L), isoleucine (I), methionine (M), and valine (V).

[0161] In some embodiments, the mutant IFNβ comprises SEQ ID NO: 48 and a mutation at L88, the mutation being an aliphatic hydrophobic residue selected from glycine (G), alanine (A), isoleucine (I), methionine (M), and valine (V). In some embodiments, the mutant IFNB comprises SEQ ID NO: 48 and a mutation at Y92, the mutation being an aliphatic hydrophobic residue selected from glycine (G), alanine (A), leucine (L), isoleucine (I), methionine (M), and valine (V).

[0162] In some embodiments, the mutant IFNβ comprises SEQ ID NO: 48 and a mutation at F67, the mutation being an aliphatic hydrophobic residue selected from glycine (G), alanine (A), leucine (L), isoleucine (I), methionine (M), and valine (V) and a mutation at L88, the mutation being an aliphatic hydrophobic residue selected from glycine (G), alanine (A), isoleucine (I), methionine (M), and valine (V) and a mutation at Y92, the mutation being an aliphatic hydrophobic residue selected from glycine (G), alanine (A), leucine (L), isoleucine (I), methionine (M), and valine (V).

[0163] In some embodiments, the mutant IFNβ comprises SEQ ID NO: 48 and a mutation at L88, the mutation being an aliphatic hydrophobic residue selected from glycine (G), alanine (A), isoleucine (I), methionine (M), and valine (V) and a mutation at Y92, the mutation being an aliphatic hydrophobic residue selected from glycine (G), alanine (A), leucine (L), isoleucine (I), methionine (M), and valine (V).

[0164] In some embodiments, the mutant IFNβ comprises SEQ ID NO: 48 and a mutation at 195, the mutation being an aliphatic hydrophobic residue selected from glycine (G), alanine (A), leucine (L), methionine (M), and valine (V) and a mutation at Y92, the mutation being an aliphatic hydrophobic residue selected from glycine (G), alanine (A), leucine (L), isoleucine (I), methionine (M), and valine (V).

[0165] In some embodiments, the mutant IFNβ comprises SEQ ID NO: 48 and a mutation at N96, the mutation being an aliphatic hydrophobic residue selected from glycine (G), alanine (A), leucine (L), isoleucine (I), methionine (M), and valine (V) and a mutation at Y92, the mutation being an aliphatic hydrophobic residue selected from glycine (G), alanine (A), leucine (L), isoleucine (I), methionine (M), and valine (V).

[0166] In some embodiments, the mutant IFNβ comprises SEQ ID NO: 48 and a mutation at Y92, the mutation being an aliphatic hydrophobic residue selected from glycine (G), alanine (A), leucine (L), isoleucine (I), methionine (M), and valine (V) and a mutation at 195, the mutation being an aliphatic hydrophobic residue selected from glycine (G), alanine (A), leucine (L), methionine (M), and valine (V) and a mutation at N96, the mutation being an aliphatic hydrophobic residue selected from glycine (G), alanine (A), leucine (L), isoleucine (I), methionine (M), and valine (V).

[0167] In some embodiments, the mutant IFNβ comprises SEQ ID NO: 48 and a mutation at K123, the mutation being an aliphatic hydrophobic residue selected from glycine (G), alanine (A), leucine (L), isoleucine (I), methionine (M), and valine (V).

[0168] In some embodiments, the mutant IFNβ comprises SEQ ID NO: 48 and a mutation at R124, the mutation being an aliphatic hydrophobic residue selected from glycine (G), alanine (A), leucine (L), isoleucine (I), methionine (M), and valine (V).

[0169] In some embodiments, the mutant IFNβ comprises SEQ ID NO: 48 and a mutation at K123, the mutation being an aliphatic hydrophobic residue selected from glycine (G), alanine (A), leucine (L), isoleucine (I), methionine (M), and valine (V) and a mutation at R124, the mutation being an aliphatic hydrophobic residue selected from glycine (G), alanine (A), leucine (L), isoleucine (I), methionine (M), and valine (V).

[0170] In some embodiments, the mutant IFNβ comprises SEQ ID NO: 48 and a mutation at L151, the mutation being an aliphatic hydrophobic residue selected from glycine (G), alanine (A), isoleucine (I), methionine (M), and valine (V). In some embodiments, the mutant IFNβ comprises SEQ ID NO: 48 and a mutation at R152, the mutation being an aliphatic hydrophobic residue selected from glycine (G), alanine (A), leucine (L), isoleucine (I), methionine (M), and valine (V).

[0171] In some embodiments, the mutant IFNβ comprises SEQ ID NO: 48 and a mutation at L151, the mutation being an aliphatic hydrophobic residue selected from glycine (G), alanine (A), isoleucine (I), methionine (M), and valine (V) and a mutation at R152, the mutation being an aliphatic hydrophobic residue selected from glycine (G), alanine (A), leucine (L), isoleucine (I), methionine (M), and valine (V).

[0172] In some embodiments, the mutant IFNβ comprises SEQ ID NO: 48 and a mutation at V148, the mutation being an aliphatic hydrophobic residue selected from glycine (G), alanine (A), leucine (L), isoleucine (I), and methionine (M). In some embodiments, the mutant IFNβ comprises SEQ ID NO: 48 and a mutation at V148, the mutation being an aliphatic hydrophobic residue selected from glycine (G), alanine (A), leucine (L), isoleucine (I), methionine (M), and valine (V) and a mutation at R152, the mutation being an aliphatic hydrophobic residue selected from glycine (G), alanine (A), leucine (L), isoleucine (I), methionine (M), and valine (V).

[0173] In some embodiments, the mutant IFNβ comprises SEQ ID NO: 48 and a mutation at Y155, the mutation being an aliphatic hydrophobic residue selected from glycine (G), alanine (A), leucine (L), isoleucine (I), methionine (M), and valine (V).

[0174] In some embodiments, the present invention relates to a chimeric protein or chimeric protein complex comprising: (a) a modified IFN-β, having the amino acid sequence of SEQ ID NO: 48 and a mutation at position W22, wherein the mutation is an aliphatic hydrophobic residue; and (b) one or more targeting moieties, said targeting moieties comprising recognition domains which specifically bind to antigens or receptors of interest (e.g., Clec4C), the modified IFN-β and the one or more targeting moieties are optionally connected with one or more linkers. In various embodiments the mutation at position W22 is aliphatic hydrophobic residue is selected from G, A, L, I, M, and V. In various embodiments the mutation at position W22 is G.

[0175] Additional illustrative IFNβ mutants are provided in PCT/EP2017/061544, the entire disclosure of which is incorporated by reference herein.

[0176] In some embodiments, the modified signaling agent is interferon γ. In such embodiments, the modified interferon γ agent has reduced affinity and/or activity for the interferon-gamma receptor (IFNGR), i.e., IFNGR1 and IFNGR2 chains. In some embodiments, the modified interferon γ agent has substantially reduced or ablated affinity and/or activity for the interferon-gamma receptor (IFNGR), i.e., IFNGR1 and/or IFNGR2 chains.

[0177] IFN-γ is the only member of the type II class of interferons. IFN-γ is produced predominantly by natural killer (NK) and natural killer T (NKT) cells as part of the innate immune response. IFN-γ is also produced by CD4 Th1 and CD8 cytotoxic T lymphocyte (CTL) effector T cells, macrophages, dendritic cells, and B cells. Activated IFN-γ forms a dimer which acts through a heterodimeric receptor (i.e., IFN-γ receptor or IFN-γR) composed of IFN-γ receptor 1 and IFN-γ receptor 2 subunits. IFN-γ receptor 1 is the major ligand-binding subunit, while IFN-γ receptor 2 is necessary for signal transduction and also increases the affinity of IFN-γ receptor 1 for its ligand. Binding of the IFN-γ dimer to the receptor activates the JAK-STAT signaling pathway to elicit various biological effects.

[0178] In various embodiments, the modified signaling agent comprises a modified version of IFN-γ as a signaling agent. In various embodiments, the IFN-γ encompasses functional derivatives, analogs, precursors, isoforms, splice variants, or fragments of IFN-γ. In various embodiments, the IFN-γ encompasses IFN-γ derived from any species. In an embodiment, the modified signaling agent comprises a modified version of mouse IFN-γ. In another embodiment, the modified signaling agent comprises a modified version of human IFN-γ.

[0179] Human IFN-γ is a polypeptide comprising 166 amino acid residues. In an embodiment, the human IFN-γ has the amino acid sequence of SEQ ID NO: 330, in which the signal peptide comprises the first 23 amino acids.

(SEQ ID NO: 330; N-terminal signal peptide underlined)
MKYTSYILAFQLCIVLGSLGCYCQDPYVKEAENLKKYFNAGHSDVADNGTLFLGILKNWK
EESDRKIMQSQIVSFYFKLFKNFKDDQSIQKSVETIKEDMNVKFFNSNKKKRDDFEKLTN
YSVTDLNVQRKAIHELIQVMAELSPAAKTGKRKRSQMLFRGRRASQ.

[0180] As used herein, human IFN-γ may also refer to mature human IFN-γ without the N-terminal signal peptide. In this embodiment, the mature human IFN-γ comprises 143 amino acids and has the amino acid sequence of:

(SEQ ID NO: 331)
QDPYVKEAENLKKYFNAGHSDVADNGTLFLGILKNWKEESDRKIMQSQIVS
FYFKLFKNFKDDQSIQKSVETIKEDMNVKFFNSNKKKRDDFEKLTNYSVTD
LNVQRKAIHELIQVMAELSPAAKTGKRKRSQMLFRGRRASQ.

[0181] In some embodiments, the human IFN-γ is a glycosylated form of human IFN-γ. In some embodiments, the human IFN-γ is a non-glycosylated form of human IFN-γ.

[0182] The sequences of IFN-γ are known in the art. In various embodiments the modified IFN-γ comprises an amino acid sequence that has at least about 60%, or at least about 61%, or at least about 62%, or at least about 63%, or at least about 64%, or at least about 65%, or at least about 66%, or at least about 67%, or at least about 68%, or at least about 69%, or at least about 70%, or at least about 71%, or at least about 72%, or at least about 73%, or at least about 74%, or at least about 75%, or at least about 76%, or at least about 77%, or at least about 78%, or at least about 79%, or at least about 80%, or at least about 81%, or at least about 82%, or at least about 83%, or at least about 84%, or at least about 85%, or at least about 86%, or at least about 87%, or at least about 88%, or at least about 89%, or at least about 90%, or at least about 91%, or at least about 92%, or at least about 93%, or at least about 94%, or at least about 95%, or at least about 96%, or at least about 97%, or at least about 98%, or at least about 99% sequence identity with the known wild type amino acid sequences of IFN-γ (e.g., about 60%, or about 61%, or about 62%, or about 63%, or about 64%, or about 65%, or about 66%, or about 67%, or about 68%, or about 69%, or about 70%, or about 71%, or about 72%, or about 73%, or about 74%, or about 75%, or about 76%, or about 77%, or about 78%, or about 79%, or about 80%, or about 81%, or about 82%, or about 83%, or about 84%, or about 85%, or about 86%, or about 87%, or about 88%, or about 89%, or about 90%, or about 91%, or about 92%, or about 93%, or about 94%, or about 95%, or about 96%, or about 97%, or about 98%, or about 99% sequence identity).

[0183] In some embodiments the modified IFN-γ comprises an amino acid sequence that has at least about 60%, or at least about 61%, or at least about 62%, or at least about 63%, or at least about 64%, or at least about 65%, or at least about 66%, or at least about 67%, or at least about 68%, or at least about 69%, or at least about 70%, or at least about 71%, or at least about 72%, or at least about 73%, or at least about 74%, or at least about 75%, or at least about 76%, or at least about 77%, or at least about 78%, or at least about 79%, or at least about 80%, or at least about 81%, or at least about 82%, or at least about 83%, or at least about 84%, or at least about 85%, or at least about 86%, or at least about 87%, or at least about 88%, or at least about 89%, or at least about 90%, or at least about 91%, or at least about 92%, or at least about 93%, or at least about 94%, or at least about 95%, or at least about 96%, or at least about 97%, or at least about 98%, or at least about 99% sequence identity with human IFN-γ having an amino acid sequence of SEQ ID NO: 330 (e.g., about 60%, or about 61%, or about 62%, or about 63%, or about 64%, or about 65%, or about 66%, or about 67%, or about 68%, or about 69%, or about 70%, or about 71%, or about 72%, or about 73%, or about 74%, or about 75%, or about 76%, or about 77%, or about 78%, or about 79%, or about 80%, or about 81%, or about 82%, or about 83%, or about 84%, or about 85%, or about 86%, or about 87%, or about 88%, or about 89%, or about 90%, or about 91%, or about 92%, or about 93%, or about 94%, or about 95%, or about 96%, or about 97%, or about 98%, or about 99% sequence identity).

[0184] In some embodiments the modified IFN-γ comprises an amino acid sequence that has at least about 60%, or at least about 61%, or at least about 62%, or at least about 63%, or at least about 64%, or at least about 65%, or at least about 66%, or at least about 67%, or at least about 68%, or at least about 69%, or at least about 70%, or at least about 71%, or at least about 72%, or at least about 73%, or at least about 74%, or at least about 75%, or at least about 76%, or at least about 77%, or at least about 78%, or at least about 79%, or at least about 80%, or at least about 81%, or at least about 82%, or at least about 83%, or at least about 84%, or at least about 85%, or at least about 86%, or at least about 87%, or at least about 88%, or at least about 89%, or at least about 90%, or at least about 91%, or at least about 92%, or at least about 93%, or at least about 94%, or at least about 95%, or at least about 96%, or at least about 97%, or at least about 98%, or at least about 99% sequence identity with human IFN-γ having an amino acid sequence of SEQ ID NO: 331 (e.g., about 60%, or about 61%, or about 62%, or about 63%, or about 64%, or about 65%, or about 66%, or about 67%, or about 68%, or about 69%, or about 70%, or about 71%, or about 72%, or about 73%, or about 74%, or about 75%, or about 76%, or about 77%, or about 78%, or about 79%, or about 80%, or about 81%, or about 82%, or about 83%, or about 84%, or about 85%, or about 86%, or about 87%, or about 88%, or about 89%, or about 90%, or about 91%, or about 92%, or about 93%, or about 94%, or about 95%, or about 96%, or about 97%, or about 98%, or about 99% sequence identity).

[0185] In various embodiments, the modified IFN-γ comprises an amino acid sequence having one or more amino acid mutations. In some embodiments, the one or more amino acid mutations may be independently selected from substitutions, insertions, deletions, and truncations.

[0186] In some embodiments, the amino acid mutations are amino acid substitutions, and may include conservative and/or non-conservative substitutions.

[0187] “Conservative substitutions” may be made, for instance, on the basis of similarity in polarity, charge, size, solubility, hydrophobicity, hydrophilicity, and/or the amphipathic nature of the amino acid residues involved. The 20 naturally occurring amino acids can be grouped into the following six standard amino acid groups: (1) hydrophobic: Met, Ala, Val, Leu, Ile; (2) neutral hydrophilic: Cys, Ser, Thr; Asn, Gln; (3) acidic: Asp, Glu; (4) basic: His, Lys, Arg; (5) residues that influence chain orientation: Gly, Pro; and (6) aromatic: Trp, Tyr, Phe.

[0188] As used herein, “conservative substitutions” are defined as exchanges of an amino acid by another amino acid listed within the same group of the six standard amino acid groups shown above. For example, the exchange of Asp by Glu retains one negative charge in the so modified polypeptide. In addition, glycine and proline may be substituted for one another based on their ability to disrupt a-helices.

[0189] As used herein, “non-conservative substitutions” are defined as exchanges of an amino acid by another amino acid listed in a different group of the six standard amino acid groups (1) to (6) shown above.

[0190] In various embodiments, the substitutions may also include non-classical amino acids (e.g., selenocysteine, pyrrolysine, N-formylmethionine β-alanine, GABA and δ-Aminolevulinic acid, 4-aminobenzoic acid (PABA), D-isomers of the common amino acids, 2,4-diaminobutyric acid, α-amino isobutyric acid, 4-aminobutyric acid, Abu, 2-amino butyric acid, γ-Abu, ε-Ahx, 6-amino hexanoic acid, Aib, 2-amino isobutyric acid, 3-amino propionic acid, ornithine, norleucine, norvaline, hydroxyproline, sarcosme, citrulline, homocitrulline, cysteic acid, t-butylglycine, t-butylalanine, phenylglycine, cyclohexylalanine, β-alanine, fluoro-amino acids, designer amino acids such as β methyl amino acids, C α-methyl amino acids, N α-methyl amino acids, and amino acid analogs in general).

[0191] In various embodiments, the IFN-γ is modified to have one or more mutations. In some embodiments, the mutations allow for the modified IFN-γ to have one or more of attenuated activity such as one or more of reduced binding affinity, reduced endogenous activity, and reduced specific bioactivity relative to unmutated, e.g., the wild type form of IFN-γ. For instance, the one or more of attenuated activity such as reduced binding affinity, reduced endogenous activity, and reduced specific bioactivity relative to unmutated, e.g., the wild type form of IFN-γ may be at a therapeutic receptor such as the IFN-γ receptor. Consequentially, in various embodiments, the mutations allow for the modified soluble agent to have reduced systemic toxicity, reduced side effects, and reduced off-target effects relative to unmutated, e.g., the wild type form of IFN-γ.

[0192] In various embodiments, the IFN-γ is modified to have a mutation that reduces its binding affinity and/or activity at a therapeutic receptor such as the IFN-γ receptor comprising the IFN-γ receptor 1 and IFN-γ receptor 2 subunits. In some embodiments, the activity provided by the wild type IFN-γ is agonism at the therapeutic receptor (e.g., activation of a cellular effect at a site of therapy). For example, the wild type IFN-γ may activate the therapeutic receptor. In such embodiments, the mutation results in the modified IFN-γ to have reduced activating activity at the therapeutic receptor.

[0193] In some embodiments, the reduced affinity and/or activity at the therapeutic receptor (e.g., IFN-γ receptor) is restorable by attachment with a targeting moiety. In other embodiments, the reduced affinity and/or activity at the therapeutic receptor is not substantially restorable by attachment with the targeting moiety. In various embodiments, the therapeutic chimeric proteins or chimeric protein complexes of the present invention reduce off-target effects because the IFN-γ has mutations that weaken binding affinity and/or activity at a therapeutic receptor. In various embodiments, this reduces side effects observed with, for example, the wild type IFN-γ. In various embodiments, the modified IFN-γ is substantially inactive en route to the site of therapeutic activity and has its effect substantially on specifically targeted cell types which greatly reduces undesired side effects.

[0194] In various embodiments, the modified IFN-γ has one or more mutations that cause the IFN-γ to have attenuated or reduced affinity and/or activity, e.g., binding (e.g., K_{D}) and/or activation (measurable as, for example, K_{A} and/or EC50) for one or more therapeutic receptors (e.g., IFN-γ receptor). In various embodiments, the reduced affinity and/or activity at the therapeutic receptor allows for attenuation of activity and/or signaling from the therapeutic receptor.

[0195] In various embodiments, the modified IFN-γ has one or more mutations that reduce its binding to or its affinity for and/or biological activity for the IFN-γ receptor 1 subunit. In one embodiment, the modified IFN-γ has reduced affinity and/or activity at the IFN-γ receptor 1 subunit. In various embodiments, the modified IFN-γ is human IFN-γ that has one or more mutations at amino acid residues involved with binding to the IFN-γ receptor 1 subunit. In some embodiments, the modified IFN-γ is human IFN-γ that has one or more mutations at amino acids located at the interface with the IFN-γ receptor 1 subunit. In various embodiments, the one or more mutations are at amino acids selected from, but not limited to Q1, V5, E9, K12, H19, S20, V22, A23, D24, N25, G26, T27, L30, K108, H111, E112, 1114, Q115, A118, E119, and K125 (each with respect SEQ ID NO: 331, which is a wild type human IFN-γ and which lacks its N-terminal signal sequence). In some embodiments, the one or more mutations are substitutions selected from V5E, S20E, V22A, A23G, A23F, D24G, G26Q, H111A, H111D, 1114A, Q115A, and A118G (each with respect SEQ ID NO: 331). In embodiments, the one or more mutations are substitutions selected from V22A, A23G, D24G, H111A, H111D, 1114A, Q115A, and A118G.

[0196] In an embodiment, the modified IFN-γ comprises the mutations A23G and D24G. In another embodiment, the modified IFN-γ comprises the mutations 1114A and A118G. In a further embodiment, the modified IFN-γ comprises the mutations V5E, S20E, A23F, and G26Q.

[0197] In various embodiments, the modified IFN-γ has one or more of the following mutations: deletion of residue A23, deletion of residue D24, an S201 substitution, an A23V substitution, a D21K substitution and a D24A substitution.

[0198] In some embodiments, the modified IFN-γ has one or more mutations that reduce its binding to or its affinity and/or biological activity for the IFN-γ receptor 2 subunit.

[0199] In some embodiments, the modified IFN-γ has one or more mutations that reduce its binding to or its affinity and/or biological activity for both IFN-γ receptor 1 and IFN-γ receptor 2 subunits.

[0200] In some embodiments, the modified IFN-γ has one or more mutations that reduce its binding to or its affinity and/or biological activity for IFN-γ receptor 1 and one or more mutations that substantially reduce or ablate binding to or its affinity and/or biological activity for IFN-γ receptor 2. In some embodiments, chimeric proteins or chimeric protein complexes with such modified IFN-γ can provide target-selective IFN-γ receptor 1 activity (e.g., IFN-γ receptor 1 activity is restorable via targeting through the targeting moiety).

[0201] In some embodiments, the modified IFN-γ has one or more mutations that reduce its binding to or its affinity and/or biological activity for IFN-γ receptor 1 and one or more mutations that reduce its binding to or its affinity and/or biological activity for IFN-γ receptor 1. In some embodiments, chimeric proteins or chimeric protein complexes with such modified IFN-γ can provide target-selective IFN-γ receptor 1 and/or IFN-γ receptor 1 activity (e.g., IFN-Y receptor 1 and IFN-γ receptor 2 activities are restorable via targeting through the targeting moiety).

[0202] In various embodiments, the modified IFN-γ is truncated at the C-terminus. In some embodiments, the modified IFN-γ is mature IFN-γ comprising the amino acid sequence of SEQ ID NO: 331 with deletions of the C-terminal terminus. In such embodiments, the mature IFN-γ may comprise a C-terminal truncation of at least about 1, about 2, about 3, about 4, about 5, about 6, about 7, about 8, about 9, about 10, about 11, about 12, about 13, about 14, about 15, about 16, about 17, about 18, about 19, about 20, about 21, about 22, about 23, about 24, or about 25 amino acid residues. In an embodiment, the modified IFN-γ is mature IFN-γ comprising the amino acid sequence of SEQ ID NO: 331 with C-terminal deletions of 5 amino acids. In an embodiment, the modified IFN-γ is mature IFN-γ comprising the amino acid sequence of SEQ ID NO: 331 with C-terminal deletions of 7 amino acids. In an embodiment, the modified IFN-γ is mature IFN-γ comprising the amino acid sequence of SEQ ID NO: 331 with C-terminal deletions of 14 amino acids. In an embodiment, the modified IFN-γ is mature IFN-γ comprising the amino acid sequence of SEQ ID NO: 331 with C-terminal deletions of 15 amino acids. In an embodiment, the modified IFN-γ is mature IFN-γ comprising the amino acid sequence of SEQ ID NO: 331 with C-terminal deletions of 16 amino acids. Additional modified IFN-γ with C-terminal truncations that may be utilized in the present invention is described in Haelewyn et al., Biochem. J. (1997), 324:591-595 and Lundell et al., Protein Eng. (1991) 4:335-341, the entire contents are hereby incorporated by reference

[0203] In various embodiments, the modified IFN-γ is a single chain IFN-γ as described, for example, in Randal et al. (2001) Structure 9:155-163 and Randal et al. (1998) Protein Sci. 7:1057-1060, the entire contents are hereby incorporated by reference. In some embodiments, the single chain IFN-γ comprises a first IFN-γ chain linked at its C-terminus to the N-terminus of a second IFN-γ chain. In various embodiments, the first and second IFN-γ chains are linked by a linker, as described elsewhere herein.

[0204] In some embodiments, the first IFN-γ chain comprises a C-terminal truncation of at least about 1, about 2, about 3, about 4, about 5, about 6, about 7, about 8, about 9, about 10, about 11, about 12, about 13, about 14, about 15, about 16, about 17, about 18, about 19, about 20, about 21, about 22, about 23, about 24, or about 25 amino acid residues. In an embodiment, the first IFN-γ chain comprises a C-terminal truncation of about 24 amino acid residues. In some embodiments, the second IFN-γ chain comprises an N-terminal truncation of at least about 1, about 2, about 3, about 4, or about 5 amino acid residues. In an embodiment, the second IFN-γ chain comprises an N-terminal truncation of about 3 amino acid residues. In some embodiments, the second IFN-γ chain comprises a C-terminal truncation of at least about 1, about 2, about 3, about 4, about 5, about 6, about 7, about 8, about 9, about 10, about 11, about 12, about 13, about 14, about 15, about 16, about 17, about 18, about 19, about 20, about 21, about 22, about 23, about 24, or about 25 amino acid residues. In various embodiments, the first and/or second IFN-γ chains comprise one or more amino acid mutations at Q1, V5, E9, K12, H19, S20, V22, A23, D24, N25, G26, T27, L30, K108, H111, E112, 1114, Q115, A118, E119, and K125, as described elsewhere herein. In various embodiments, the first and/or second IFN-γ chains comprise one or more substitutions selected from V5E, S20E, V22A, A23G, A23F, D24G, G26Q, H111A, H111D, 1114A, Q115A, and A118G. In various embodiments, the first and/or second IFN-γ chains comprise one or more substitutions selected from V22A, A23G, D24G, H111A, H111D, 1114A, Q115A, and A118G. In various embodiments, the first and/or second IFN-γ chains comprise the A23G and the D24G substitution. In various embodiments, the first and/or second IFN-γ chains comprise the 1114A and the A118G substitution. In another embodiment, the mutations are V5E, S20E, A23F, and G26Q.

[0205] In various embodiments, a first and/or second IFN-γ chain comprises one or more substitutions as disclosed herein and the first and/or second IFN-γ chain comprises a C-terminal truncation as disclosed herein.

[0206] In various embodiments, a first and/or second IFN-γ chain comprises one or more substitutions as disclosed herein and a C-terminal truncation as disclosed herein.

[0207] The crystal structure of human IFN-γ is known and is described in, for example, Ealick et al., (1991) Science, 252:698-702. Specifically, the structure of human IFN-γ has been shown to include a core of six a-helices and an extended unfolded sequence in the C-terminal region. In various embodiments, the modified IFN-γ has one or more mutations in the one or more helices which reduce its binding affinity and/or biological activity at a therapeutic receptor (e.g., IFN-γ receptor).

[0208] In various embodiments, the modified IFN-γ has about 1%, or about 3%, about 5%, about 10%, about 15%, about 20%, about 25%, about 30%, about 35%, about 40%, about 45%, about 50%, about 60%, about 65%, about 70%, about 75%, about 80%, about 85%, about 90%, about 95%, or about 10%-20%, about 20%-40%, about 50%, about 40%-60%, about 60%-80%, about 80%-100% of the affinity and/or biological activity for the therapeutic receptor (e.g., IFN-γ receptor or any one of its IFN-γ receptor 1 and IFN-γ receptor 2 subunits) relative to the wild type IFN-γ. In some embodiments, the binding affinity and/or biological activity is at least about 2-fold lower, about 3-fold lower, about 4-fold lower, about 5-fold lower, about 6-fold lower, about 7-fold lower, about 8-fold lower, about 9-fold lower, at least about 10-fold lower, at least about 15-fold lower, at least about 20-fold lower, at least about 25-fold lower, at least about 30-fold lower, at least about 35-fold lower, at least about 40-fold lower, at least about 45-fold lower, at least about 50-fold lower, at least about 100-fold lower, at least about 150-fold lower, or about 10-50-fold lower, about 50-100-fold lower, about 100-150-fold lower, about 150-200-fold lower, or more than 200-fold lower relative to the wild type IFN-γ.

[0209] In various embodiments, the modified IFN-γ comprises one or more mutations that reduce the endogenous activity of the IFN-γ to about 75%, or about 70%, or about 60%, or about 50%, or about 40%, or about 30%, or about 25%, or about 20%, or about 10%, or about 5%, or about 3%, or about 1%, e.g., relative to the wild type IFN-γ.

[0210] In some embodiments, the modified IFN-γ comprises one or more mutations that cause the modified IFN-γ to have reduced affinity and/or biological activity for a receptor. In some embodiments, the modified IFN-γ's binding affinity and/or biological activity for a receptor is lower than the binding affinity and/or biological activity of the targeting moiety for its receptor. In some embodiments, this binding affinity and/or biological activity differential is between the modified IFN-γ/receptor and targeting moiety/receptor on the same cell. In some embodiments, this binding affinity and/or biological activity, differential allows for the modified IFN-γ to have localized, on-target effects and to minimize off-target effects that underlie side effects that are observed with wild type IFN-γ. In some embodiments, this binding affinity and/or biological activity is at least about 2-fold, or at least about 5-fold, or at least about 10-fold, or at least about 15-fold lower, or at least about 25-fold, or at least about 50-fold lower, or at least about 100-fold, or at least about 150-fold less.

[0211] Receptor binding activity may be measured using methods known in the art. For example, affinity and/or binding activity may be assessed by Scatchard plot analysis and computer-fitting of binding data (e.g., Scatchard, 1949) or by reflectometric interference spectroscopy under flow through conditions, as described by Brecht et al. (1993), the entire contents of all of which are hereby incorporated by reference.

[0212] In some embodiments, the modified signaling agent is a consensus interferon. The consensus interferon is generated by scanning the sequences of several human non-allelic IFN-α subtypes and assigning the most frequently observed amino acid in each corresponding position. The consensus interferon differs from IFN-α2b at 20 out of 166 amino acids (88% homology), and comparison with IFN-β shows identity at over 30% of the amino acid positions. In various embodiments, the consensus interferon comprises the following amino acid sequence of SEQ ID NO:49.

[0213] In some embodiments, the consensus interferon comprises the amino acid sequence of SEQ ID NO: 50, which differs from the amino acid sequence of SEQ ID NO: 49 by one amino acid, i.e., SEQ ID NO: 50 lacks the initial methionine residue of SEQ ID NO: 49.

[0214] In various embodiments, the consensus interferon comprises a modified version of the consensus interferon, i.e., a consensus interferon variant, as a signaling agent. In various embodiments, the consensus interferon variant encompasses functional derivatives, analogs, precursors, isoforms, splice variants, or fragments of the consensus interferon.

[0215] In an embodiment, the consensus interferon variants are selected form the consensus interferon variants disclosed in U.S. Pat. Nos. 4,695,623, 4,897,471, 5,541,293, and 8,496,921, the entire contents of all of which are hereby incorporated by reference. For example, the consensus interferon variant may comprise the amino acid sequence of IFN-CON₂ or IFN-CON₃ as disclosed in U.S. Pat. Nos. 4,695,623, 4,897,471, and 5,541,293. In an embodiment, the consensus interferon variant comprises the amino acid sequence of IFN-CON₂ (SEQ ID NO:51).

[0216] In an embodiment, the consensus interferon variant comprises the amino acid sequence of IFN-CON₃ (SEQ ID NO: 52).

[0217] In an embodiment, the consensus interferon variant comprises the amino acid sequence of any one of the variants disclosed in U.S. Pat. No. 8,496,921. For example, the consensus variant may comprise the amino acid sequence of SEQ ID NO:53.

[0218] In another embodiment, the consensus interferon variant may comprise the amino acid sequence of SEQ ID NO: 54.

[0219] In some embodiments, the consensus interferon variant may be PEGylated, i.e., comprises a PEG moiety. In an embodiment, the consensus interferon variant may comprise a PEG moiety attached at the S156C position of SEQ ID NO: 54.

[0220] In some embodiments, the engineered interferon is a variant of human IFN-α2a, with an insertion of Asp at approximately position 41 in the sequence Glu-Glu-Phe-Gly-Asn-Gln (SEQ ID NO: 275) to yield Glu-Glu-Phe-Asp-Gly-Asn-Gln (SEQ ID NO: 276) (which resulted in a renumbering of the sequence relative to IFN-α2a sequence) and the following mutations of Arg23Lys, Leu26Pro, Glu53GIn, Thr54Ala, Pro56Ser, Asp86Glu, Ile104Thr, Gly106Glu, Thr110Glu, Lys117Asn, Arg125Lys, and Lys136Thr. All embodiments herein that describe consensus interferons apply equally to this engineered interferon

[0221] In various embodiments, the consensus interferon variant comprises an amino acid sequence having one or more amino acid mutations. In some embodiments, the one or more amino acid mutations may be independently selected from substitutions, insertions, deletions, and truncations.

[0222] In some embodiments, the amino acid mutations are amino acid substitutions, and may include conservative and/or non-conservative substitutions.

[0223] In various embodiments, the substitutions may also include non-classical amino acids (e.g. selenocysteine, pyrrolysine, N-formylmethionine β-alanine, GABA and δ-Aminolevulinic acid, 4-aminobenzoic acid (PABA), D-isomers of the common amino acids, 2,4-diaminobutyric acid, α-amino isobutyric acid, 4-aminobutyric acid, Abu, 2-amino butyric acid, γ-Abu, ε-Ahx, 6-amino hexanoic acid, Aib, 2-amino isobutyric acid, 3-amino propionic acid, ornithine, norleucine, norvaline, hydroxyproline, sarcosme, citrulline, homocitrulline, cysteic acid, t-butylglycine, t-butylalanine, phenylglycine, cyclohexylalanine, β-alanine, fluoro-amino acids, designer amino acids such as β methyl amino acids, C α-methyl amino acids, N α-methyl amino acids, and amino acid analogs in general).

[0224] In various embodiments, the consensus interferon is modified to have one or more mutations. In some embodiments, the mutations allow for the consensus interferon variant to have one or more of attenuated activity such as one or more of reduced binding affinity, reduced endogenous activity, and reduced specific bioactivity relative to unmutated, e.g., the wild type form of the consensus interferon (e.g., the consensus interferon having an amino acid sequence of SEQ ID NO:49 or 50). For instance, the one or more of attenuated activity such as reduced binding affinity, reduced endogenous activity, and reduced specific bioactivity relative to unmutated, e.g. the wild type form of the consensus interferon, may be at a therapeutic receptor such as IFNAR. Consequentially, in various embodiments, the mutations allow for the consensus interferon variant to have reduced systemic toxicity, reduced side effects, and reduced off-target effects relative to unmutated, e.g. the wild type form of the consensus interferon.

[0225] In various embodiments, the consensus interferon is modified to have a mutation that reduces its binding affinity or activity at a therapeutic receptor such as IFNAR. In some embodiments, the activity provided by the consensus interferon is agonism at the therapeutic receptor (e.g. activation of a cellular effect at a site of therapy). For example, the consensus interferon may activate the therapeutic receptor. In such embodiments, the mutation results in the consensus interferon variant to have reduced activating activity at the therapeutic receptor.

[0226] In some embodiments, the reduced affinity or activity at the therapeutic receptor is restorable by attachment with a targeting moiety (e.g., Clec4C). In other embodiments, the reduced affinity or activity at the therapeutic receptor is not substantially restorable by attachment with the targeting moiety. In various embodiments, the therapeutic chimeric proteins or chimeric protein complexes of the present invention reduce off-target effects because the consensus interferon variant has mutations that weaken binding affinity or activity at a therapeutic receptor. In various embodiments, this reduces side effects observed with, for example, the wild type consensus interferon. In various embodiments, the consensus interferon variant is substantially inactive en route to the site of therapeutic activity and has its effect substantially on specifically targeted cell types which greatly reduces undesired side effects.

[0227] In various embodiments, the consensus interferon variant has one or more mutations that cause the consensus interferon variant to have attenuated or reduced affinity, e.g. binding (e.g. K_{D}) and/or activation (measurable as, for example, K_{A} and/or EC50) for one or more therapeutic receptors. In various embodiments, the reduced affinity at the therapeutic receptor allows for attenuation of activity and/or signaling from the therapeutic receptor.

[0228] In various embodiments, the consensus interferon variant has one or more mutations that reduce its binding to or its affinity for the IFNAR1 subunit of IFNAR. In one embodiment, the consensus interferon variant has reduced affinity and/or activity at IFNAR1. In some embodiments, the consensus interferon variant has one or more mutations that reduce its binding to or its affinity for the IFNAR2 subunit of IFNAR. In some embodiments, the consensus interferon variant has one or more mutations that reduce its binding to or its affinity for both IFNAR1 and IFNAR2 subunits.

[0229] In some embodiments, the consensus interferon variant has one or more mutations that reduce its binding to or its affinity for IFNAR1 and one or more mutations that substantially reduce or ablate binding to or its affinity for IFNAR2. In some embodiments, chimeric proteins or chimeric protein complexes with such consensus interferon variant can provide target-selective IFNAR1 activity (e.g. IFNAR1 activity is restorable via targeting through the targeting moiety, e.g., Clec4C).

[0230] In some embodiments, the consensus interferon variant has one or more mutations that reduce its binding to or its affinity for IFNAR2 and one or more mutations that substantially reduce or ablate binding to or its affinity for IFNAR1. In some embodiments, chimeric proteins or chimeric protein complexes with such consensus interferon variant can provide target-selective IFNAR2 activity (e.g. IFNAR2 activity is restorable via targeting through the targeting moiety, e.g., Clec4C).

[0231] In some embodiments, the consensus interferon variant has one or more mutations that reduce its binding to or its affinity for IFNAR1 and one or more mutations that reduce its binding to or its affinity for IFNAR2. In some embodiments, chimeric proteins or chimeric protein complexes with such consensus interferon variant can provide target-selective IFNAR1 and/or IFNAR2 activity (e.g. IFNAR1 and/IFNAR2 activity is restorable via targeting through the targeting moiety, e.g., Clec4C).

[0232] In some embodiments, the consensus interferon is modified to have a mutation at one or more amino acids at positions 145-155, such as amino acid positions 149, 150 and/or 154, with reference to SEQ ID NO: 50. In some embodiments, the consensus interferon is modified to have a mutation at one or more amino acids at positions 145-155, such as amino acid positions 149, 150 and/or 154, with reference to SEQ ID NO: 50, the substitutions optionally being hydrophobic and selected from alanine, valine, leucine, and isoleucine. In some embodiments, the consensus interferon mutant comprises one or more mutations selected from M149A, R150A, and L154A, and, with reference to SEQ ID NO: 50.

[0233] In an embodiment, the consensus interferon is modified to have a mutation at amino acid position 121 (i.e., K121), with reference to SEQ ID NO: 50. In an embodiment, the consensus interferon comprises a K121E mutation, with reference to SEQ ID NO: 50.

[0234] In various embodiments, the modified signaling agent is selected from modified versions of cytokines, growth factors, and hormones. Illustrative examples of such cytokines, growth factors, and hormones include, but are not limited to, lymphokines, monokines, traditional polypeptide hormones, such as human growth hormone, N-methionyl human growth hormone, and bovine growth hormone; parathyroid hormone; thyroxine; insulin; proinsulin; relaxin; prorelaxin; glycoprotein hormones such as follicle stimulating hormone (FSH), thyroid stimulating hormone (TSH), and luteinizing hormone (LH); hepatic growth factor; fibroblast growth factor; prolactin; placental lactogen; tumor necrosis factor-a and tumor necrosis factor-β; mullerian-inhibiting substance; mouse gonadotropin-associated peptide; inhibin; activin; vascular endothelial growth factor; integrin; thrombopoietin (TPO); nerve growth factors such as NGF-a; platelet-growth factor; transforming growth factors (TGFs) such as TGF-a and TGF-B; insulin-like growth factor- and -II; osteo inductive factors; interferons such as, for example, interferon-a, interferon-β and interferon-y (and interferon type I, II, and III), colony stimulating factors (CSFs) such as macrophage-CSF (M-CSF); granulocyte-macrophage-CSF (GM-CSF); and granulocyte-CSF (G-CSF); interleukins (ILs) such as, for example, IL-1, IL-1a, IL-2, IL-3, IL-4, IL-5, IL-6, IL-7, IL-8, IL-9, IL-10, IL-11, IL-12, IL-13, and IL-18; a tumor necrosis factor such as, for example, TNF-α or TNF-β; and other polypeptide factors including, for example, LIF and kit ligand (KL). As used herein, cytokines, growth factors, and hormones include proteins obtained from natural sources or produced from recombinant bacterial, eukaryotic or mammalian cell culture systems and biologically active equivalents of the native sequence cytokines.

[0235] In some embodiments, the modified signaling agent is a modified version of a growth factor selected from, but not limited to, transforming growth factors (TGFs) such as TGF-a and TGF-B (and subtypes thereof including the various subtypes of TGF-β including TGFβ1, TGFβ2, and TGFβ3), epidermal growth factor (EGF), insulin-like growth factor such as insulin-like growth factor-I and -II, fibroblast growth factor (FGF), heregulin, platelet-derived growth factor (PDGF), vascular endothelial growth factor (VEGF).

[0236] In an embodiment, the growth factor is a modified version of a fibroblast growth factor (FGF). Illustrative FGFs include, but are not limited to, FGF1, FGF2, FGF3, FGF4, FGF5, FGF6, FGF7, FGF8, FGF9, FGF10, FGF11, FGF12, FGF13, FGF14, murine FGF15, FGF16, FGF17, FGF18, FGF19, FGF20, FGF21, FGF22, and FGF23.

[0237] In some embodiments, the modified signaling agent is vascular endothelial growth factor (VEGF). VEGF is a potent growth factor that plays major roles in physiological but also pathological angiogenesis, regulates vascular permeability and can act as a growth factor on cells expressing VEGF receptors. Additional functions include, among others, stimulation of cell migration in macrophage lineage and endothelial cells. Several members of the VEGF family of growth factors exist, as well as at least three receptors (VEGFR-1, VEGFR-2, and VEGFR-3). Members of the VEGF family can bind and activate more than one VEGFR type. For example, VEGF-A binds VEGFR-1 and−2, while VEGF-C can bind VEGFR-2 and−3. VEGFR-1 and−2 activation regulates angiogenesis while VEGFR-3 activation is associated with lymphangiogenesis. The major pro-angiogenic signal is generated from activation of VEGFR-2. VEGFR-1 activation has been reported to be possibly associated with negative role in angiogenesis. It has also been reported that VEGFR-1 signaling is important for progression of tumors in vivo via bone marrow-derived VEGFR-1 positive cells (contributing to formation of premetastatic niche in the bone). Several therapies based on VEGF-A directed/neutralizing therapeutic antibodies have been developed, primarily for use in treatment of various human tumors relying on angiogenesis. These are not without side effects though. This may not be surprising considering that these operate as general, non-cell/tissue specific VEGF/VEGFR interaction inhibitors. Hence, it would be desirable to restrict VEGF (e.g. VEGF-A)/VEGFR-2 inhibition to specific target cells (e.g. tumor vasculature endothelial cells).

[0238] In some embodiments, the VEGF is VEGF-A, VEGF-B, VEFG-C, VEGF-D, or VEGF-E and isoforms thereof including the various isoforms of VEGF-A such as VEGF₁₂₁, VEGF121b, VEGF145, VEGF165, VEGF165b, VEGF189, and VEGF206. In some embodiments, the modified signaling agent has reduced affinity and/or activity for VEGFR-1 (Flt-1) and/or VEGFR-2 (KDR/Flk-1). In some embodiments, the modified signaling agent has substantially reduced or ablated affinity and/or activity for VEGFR-1 (Flt-1) and/or VEGFR-2 (KDR/Flk-1). In an embodiment, the modified signaling agent has reduced affinity and/or activity for VEGFR-2 (KDR/Flk-1) and/or substantially reduced or ablated affinity and/or activity for VEGFR-1 (Flt-1). Such an embodiment finds use, for example, in wound healing methods or treatment of ischmia-related diseases (without wishing to be bound by theory, mediated by VEGFR-2's effects on endothelial cell function and angiogenesis). In various embodiments, binding to VEGFR-1 (Flt-1), which is linked to cancers and pro-inflammatory activities, is avoided. In various embodiments, VEGFR-1 (Flt-1) acts a decoy receptor and therefore substantially reduces or ablates affinity at this receptor avoids sequestration of the therapeutic agent. In an embodiment, the modified signaling agent has substantially reduced or ablated affinity and/or activity for VEGFR-1 (Flt-1) and/or substantially reduced or ablated affinity and/or activity for VEGFR-2 (KDR/Flk-1). In some embodiments, the VEGF is VEGF-C or VEGF-D. In such embodiments, the modified signaling agent has reduced affinity and/or activity for VEGFR-3. Alternatively, the modified signaling agent has substantially reduced or ablated affinity and/or activity for VEGFR-3.

[0239] Proangiogenic therapies are also important in various diseases (e.g. ischemic heart disease, bleeding etc.), and include VEGF-based therapeutics. Activation of VEGFR-2 is proangiogenic (acting on endothelial cells). Activation of VEFGR-1 can cause stimulation of migration of inflammatory cells (including, for example, macrophages) and lead to inflammation associated hypervascular permeability. Activation of VEFGR-1 can also promote bone marrow associated tumor niche formation. Thus, VEGF based therapeutic selective for VEGFR-2 activation would be desirable in this case. In addition, cell specific targeting, e.g. to endothelial cells, would be desirable.

[0240] In some embodiments, the modified signaling agent has reduced affinity and/or activity (e.g. antagonistic) for VEGFR-2 and/or has substantially reduced or ablated affinity and/or activity for VEGFR-1. When targeted to tumor vasculature endothelial cells via a targeting moiety that binds to a tumor endothelial cell marker (e.g. PSMA and others), such construct inhibits VEGFR-2 activation specifically on such marker-positive cells, while not activating VEGFR-1 en route and on target cells (if activity ablated), thus eliminating induction of inflammatory responses, for example. This would provide a more selective and safe anti-angiogenic therapy for many tumor types as compared to VEGF-A neutralizing therapies.

[0241] In some embodiments, the modified signaling agent has reduced affinity and/or activity (e.g. agonistic) for VEGFR-2 and/or has substantially reduced or ablated affinity and/or activity for VEGFR-1. Through targeting to vascular endothelial cells, such construct, in some embodiments, promotes angiogenesis without causing VEGFR-1 associated induction of inflammatory responses. Hence, such a construct would have targeted proangiogenic effects with substantially reduced risk of side effects caused by systemic activation of VEGFR-2 as well as VEGR-1.

[0242] In an illustrative embodiment, the modified signaling agent is VEGF 165, which has the amino acid sequence of SEQ ID NO: 55).

[0243] In another illustrative embodiment, the modified signaling agent is VEGF 165%, which has the amino acid sequence of SEQ ID NO:56.

[0244] In these embodiments, the modified signaling agent has a mutation at amino acid 183 (e.g., a substitution mutation at 183, e.g., 183K, 183R, or 183H). Without wishing to be bound by theory, it is believed that such mutations may result in reduced receptor binding affinity. See, for example, U.S. Pat. No. 9,078,860, the entire contents of which are hereby incorporated by reference.

[0245] In some embodiments, the modified signaling agent is a modified version of a hormone selected from, but not limited to, human chorionic gonadotropin, gonadotropin releasing hormone, an androgen, an estrogen, thyroid-stimulating hormone, follicle-stimulating hormone, luteinizing hormone, prolactin, growth hormone, adrenocorticotropic hormone, antidiuretic hormone, oxytocin, thyrotropin-releasing hormone, growth hormone releasing hormone, corticotropin-releasing hormone, somatostatin, dopamine, melatonin, thyroxine, calcitonin, parathyroid hormone, glucocorticoids, mineralocorticoids, adrenaline, noradrenaline, progesterone, insulin, glucagon, amylin, calcitriol, calciferol, atrial-natriuretic peptide, gastrin, secretin, cholecystokinin, neuropeptide Y, ghrelin, PYY3-36, insulin-like growth factor (IGF), leptin, thrombopoietin, erythropoietin (EPO), and angiotensinogen.

[0246] In some embodiments, the modified signaling agent is TNF-α. TNF is a pleiotropic cytokine with many diverse functions, including regulation of cell growth, differentiation, apoptosis, tumorigenesis, viral replication, autoimmunity, immune cell functions and trafficking, inflammation, and septic shock. It binds to two distinct membrane receptors on target cells: TNFR1 (p55) and TNFR2 (p75). TNFR1 exhibits a very broad expression pattern whereas TNFR2 is expressed preferentially on certain populations of lymphocytes, Tregs, endothelial cells, certain neurons, microglia, cardiac myocytes and mesenchymal stem cells. Very distinct biological pathways are activated in response to receptor activation, although there is also some overlap. As a general rule, without wishing to be bound by theory, TNFR1 signaling is associated with induction of apoptosis (cell death) and TNFR2 signaling is associated with activation of cell survival signals (e.g. activation of NFkB pathway). Administration of TNF is systemically toxic, and this is largely due to TNFR1 engagement. However, it should be noted that activation of TNFR2 is also associated with a broad range of activities and, as with TNFR1, in the context of developing TNF based therapeutics, control over TNF targeting and activity is important.

[0247] In some embodiments, the modified signaling agent has reduced affinity and/or activity for TNFR1 and/or TNFR2. In some embodiments, the modified signaling agent has substantially reduced or ablated affinity and/or activity for TNFR1 and/or TNFR2. TNFR1 is expressed in most tissues, and is involved in cell death signaling while, by contrast, TNFR2 is involved in cell survival signaling. Accordingly, in embodiments directed to methods of treating cancer, the modified signaling agent has reduced affinity and/or activity for TNFR1 and/or substantially reduced or ablated affinity and/or activity for TNFR2. In these embodiments, the chimeric proteins or chimeric protein complexes may be targeted to a cell for which apoptosis is desired, e.g. a tumor cell or a tumor vasculature endothelial cell. In embodiments directed to methods of promoting cell survival, for example, in neurogenesis for the treatment of neurodegenerative disorders, the modified signaling agent has reduced affinity and/or activity for TNFR2 and/or substantially reduced or ablated affinity and/or activity for TNFR1. Stated another way, the present chimeric proteins or chimeric protein complexes, in some embodiments, comprise modified TNF-α agent that allows of favoring either death or survival signals.

[0248] In some embodiments, the chimeric protein or chimeric protein complex has a modified TNF having reduced affinity and/or activity for TNFR1 and/or substantially reduced or ablated affinity and/or activity for TNFR2. Such a chimera, in some embodiments, is a more potent inducer of apoptosis as compared to a wild type TNF and/or a chimera bearing only mutation(s) causing reduced affinity and/or activity for TNFR1. Such a chimera, in some embodiments, finds use in inducing tumor cell death or a tumor vasculature endothelial cell death (e.g. in the treatment of cancers). Also, in some embodiments, these chimeras avoid or reduce activation of Treg cells via TNFR2, for example, thus further supporting TNFR1-mediated antitumor activity in vivo.

[0249] In some embodiments, the chimeric protein or chimeric protein complex has a modified TNF having reduced affinity and/or activity for TNFR2 and/or substantially reduced or ablated affinity and/or activity for TNFR1. Such a chimera, in some embodiments, is a more potent activator of cell survival in some cell types, which may be a specific therapeutic objective in various disease settings, including without limitation, stimulation of neurogenesis. In addition, such a TNFR2-favoring chimeras also are useful in the treatment of autoimmune diseases (e.g. Crohn's, diabetes, MS, colitis etc. and many others described herein). In some embodiments, the chimera is targeted to auto-reactive T cells. In some embodiments, the chimera promotes Treg cell activation and indirect suppression of cytotoxic T cells.

[0250] In some embodiments, the chimera causes the death of auto-reactive T cells, e.g. by activation of TNFR2 and/or avoidance TNFR1 (e.g. a modified TNF having reduced affinity and/or activity for TNFR2 and/or substantially reduced or ablated affinity and/or activity for TNFR1). Without wishing to be bound by theory these auto-reactive T cells, have their apoptosis/survival signals altered e.g. by NFkB pathway activity/signaling alterations. In some embodiments, the chimera causes the death of autoreactive T cells having lesions or modifications in the NFKB pathway, which underlie an imbalance of their cell death (apoptosis)/survival signaling properties and, optionally, altered susceptibility to certain death-inducing signals (e.g., TNFR2 activation).

[0251] In some embodiments, a TNFR-2 based chimera has additional therapeutic applications in diseases, including autoimmune disease, various heart disease, de-myelinating and neurodegenerative disorders, and infectious disease, among others.

[0252] In an embodiment, the wild type TNF-α has the amino acid sequence of SEQ ID NO:57.

[0253] In such embodiments, the modified TNF-α agent has mutations at one or more amino acid positions 29, 31, 32, 84, 85, 86, 87, 88, 89, 145, 146 and 147 which produces a modified TNF-α with reduced receptor binding affinity. See, for example, U.S. Pat. No. 7,993,636, the entire contents of which are hereby incorporated by reference.

[0254] In some embodiments, the modified human TNF-α moiety has mutations at one or more amino acid positions R32, N34, Q67, H73, L75, T77, S86, Y87, V91, 197, T105, P106, A109, P113, Y115, E127, N137, D143, A145, and E146 as described, for example, in WO/2015/007903, the entire contents of which is hereby incorporated by reference (numbering according to the human TNF sequence, Genbank accession number BAG70306, version BAG70306.1 GI: 197692685). In some embodiments, the modified human TNF-α moiety has substitution mutations selected from L29S, R32G, R32W, N34G, Q67G, H73G, L75G, L75A, L75S, T77A, S86G, S86T, Y87Q, Y87L, Y87A, Y87F, Y87H, V91G, V91A, 197A, 197Q, 197S, T105G, P106G, A109Y, P113G, Y115G, Y115A, E127G, N137G, D143N, A145G, A145R, A145T, E146D, E146K, and S147D. In some embodiments, the human TNF-α moiety has a mutation selected from Y87Q, Y87L, Y87A, Y87F, and Y87H. In another embodiment, the human TNF-α moiety has a mutation selected from 197A, 197Q, and 197S. In a further embodiment, the human TNF-α moiety has a mutation selected from Y115A and Y115G. In some embodiments, the human TNF-α moiety has an E146K mutation. In some embodiments, the human TNF-α moiety has an Y87H and an E146K mutation. In some embodiments, the human TNF-α moiety has an Y87H and an A145R mutation. In some embodiments, the human TNF-α moiety has a R32W and a S86T mutation. In some embodiments, the human TNF-α moiety has a R32W and an E146K mutation. In some embodiments, the human TNF-α moiety has a L29S and a R32W mutation. In some embodiments, the human TNF-α moiety has a D143N and an A145R mutation. In some embodiments, the human TNF-α moiety has a D143N and an A145R mutation. In some embodiments, the human TNF-α moiety has an A145T, an E146D, and a S147D mutation. In some embodiments, the human TNF-α moiety has an A145T and a S147D mutation.

[0255] In some embodiments, the modified TNF-α agent has one or more mutations selected from N39Y, S147Y, and Y87H, as described in WO2008/124086, the entire contents of which is hereby incorporated by reference.

[0256] In some embodiments, the modified human TNF-α moiety has mutations that provide receptor selectivity as described in PCT/IB2016/001668, the entire contents of which are hereby incorporated by reference. In some embodiments, the mutations to TNF are TNF-R1 selective. In some embodiments, the mutations to TNF which are TNF-R1 selective are at one or more of positions R32, S86, and E146. In some embodiments, the mutations to TNF which are TNF-R1 selective are one or more of R32W, S86T, and E146K. In some embodiments, the mutations to TNF which are TNF-R1 selective are one or more of R32W, R32W/S86T, R32W/E146K and E146K. In some embodiments, the mutations to TNF are TNF-R2 selective. In some embodiments, the mutations to TNF which are TNF-R2 selective are at one or more of positions A145, E146, and S147. In some embodiments, the mutations to TNF which are TNF-R2 selective are one or more of A145T, A145R, E146D, and S147D. In some embodiments, the mutations to TNF which are TNF-R2 selective are one or more of A145R, A145T/S147D, and A145T/E146D/S147D.

[0257] In an embodiment, the modified signaling agent is TNF-β. TNF-β can form a homotrimer or a heterotrimer with LT-β (LT-α1β2). In some embodiments, the modified signaling agent has substantially reduced or ablated affinity and/or activity for TNFR1 and/or TNFR2 and/or herpes virus entry mediator (HEVM) and/or LT-βR.

[0258] In an embodiment, the wild type TNF-β has the amino acid sequence of SEQ ID NO:58.

[0259] In such embodiments, the modified TNF-β agent may comprise mutations at one or more amino acids at positions 106-113, which produce a modified TNF-β with reduced receptor binding affinity to TNFR2. In an embodiment, the modified signaling agent has one or more substitution mutations at amino acid positions 106-113. In illustrative embodiments, the substitution mutations are selected from Q107E, Q107D, S106E, S106D, Q107R, Q107N, Q107E/S106E, Q107E/S106D, Q107D/S106E, and Q107D/S106D. In another embodiment, the modified signaling agent has an insertion of about 1 to about 3 amino acids at positions 106-113.

[0260] In some embodiments, the modified agent is a TNF family member (e.g. TNF-alpha, TNF-beta) which can be a single chain trimeric version as described in WO 2015/007903 and PCT/IB2016/001668, the entire contents of which are incorporated by reference.

[0261] In some embodiments, the modified agent is a TNF family member (e.g. TNF-alpha, TNF-beta) which has reduced affinity and/or activity, i.e. antagonistic activity (e.g. natural antagonistic activity or antagonistic activity that is the result of one or more mutations, see, e.g., WO 2015/007520, the entire contents of which are hereby incorporated by reference) at TNFR1. In these embodiments, the modified agent is a TNF family member (e.g. TNF-alpha, TNF-beta) which also, optionally, has substantially reduced or ablated affinity and/or activity for TNFR2. In some embodiments, the modified agent is a TNF family member (e.g. TNF-alpha, TNF-beta) which has reduced affinity and/or activity, i.e. antagonistic activity (e.g. natural antagonistic activity or antagonistic activity that is the result of one or more mutations, see, e.g., WO 2015/007520, the entire contents of which are hereby incorporated by reference) at TNFR2. In these embodiments, the modified agent is a TNF family member (e.g. TNF-alpha, TNF-beta) which also, optionally, has substantially reduced or ablated affinity and/or activity for TNFR1. The constructs of such embodiments find use in, for example, methods of dampening TNF response in a cell specific manner. In some embodiments, the antagonistic TNF family member (e.g. TNF-alpha, TNF-beta) is a single chain trimeric version as described in WO 2015/007903.

[0262] In an embodiment, the modified signaling agent is TRAIL. In some embodiments, the modified TRAIL agent has reduced affinity and/or activity for DR4 (TRAIL-RI) and/or DR5 (TRAIL-RII) and/or DcR1 and/or DcR2. In some embodiments, the modified TRAIL agent has substantially reduced or ablated affinity and/or activity for DR4 (TRAIL-RI) and/or DR5 (TRAIL-RII) and/or DcR1 and/or DcR2.

[0263] In an embodiment, the wild type TRAIL has the amino acid sequence of SEQ ID NO:59.

[0264] In such embodiments, the modified TRAIL agent may comprise a mutation at amino acid positions T127-R132, E144-R149, E155-H161, Y189-Y209, T214-1220, K224-A226, W231, E236-L239, E249-K251, T261-H264 and H270-E271 (Numbering based on the human sequence, Genbank accession number NP_003801, version 10 NP_003801.1, GI: 4507593; see above).

[0265] In some embodiments, the modified TRAIL agent may comprise one or more mutations that substantially reduce its affinity and/or activity for TRAIL-R1. In such embodiments, the modified TRAIL agent may specifically bind to TRIL-R2. Illustrative mutations include mutations at one or more amino acid positions Y189, R191, Q193, H264, 1266, and D267. For example, the mutations may be one or more of Y189Q, R191K, Q193R, H264R, 1266L and D267Q. In an embodiment, the modified TRAIL agent comprises the mutations Y189Q, R191K, Q193R, H264R, 1266L and D267Q.

[0266] In some embodiments, the modified TRAIL agent may comprise one or more mutations that substantially reduce its affinity and/or activity for TRAIL-R2. In such embodiments, the modified TRAIL agent may specifically bind to TRIL-R1. Illustrative mutations include mutations at one or more amino acid positions G131, R149, S159, N199, K201, and S215. For example, the mutations may be one or more of G131R, R1491, S159R, N199R, K201H, and S215D. In an embodiment, the modified TRAIL agent comprises the mutations G131R, R1491, S159R, N199R, K201H, and S215D. Additional TRAIL mutations are described in, for example, Trebing et al., (2014) Cell Death and Disease, 5: e1035, the entire disclosure of which is hereby incorporated by reference.

[0267] In an embodiment, the modified signaling agent is TGFα. In such embodiments, the modified TGFα agent has reduced affinity and/or activity for the epidermal growth factor receptor (EGFR). In some embodiments, the modified TGFα agent has substantially reduced or ablated affinity and/or activity for the epidermal growth factor receptor (EGFR).

[0268] In an embodiment, the modified signaling agent is TGFβ. In such embodiments, the modified signaling agent has reduced affinity and/or activity for TGFBR1 and/or TGFBR2. In some embodiments, the modified signaling agent has substantially reduced or ablated affinity and/or activity for TGFBR1 and/or TGFBR2. In some embodiments, the modified signaling agent optionally has reduced or substantially reduced or ablated affinity and/or activity for TGFBR3 which, without wishing to be bound by theory, may act as a reservoir of ligand for TGF-beta receptors. In some embodiments, the TGFβ may favor TGFBR1 over TGFBR2 or TGFBR2 over TGFBR1. Similarly, LAP, without wishing to be bound by theory, may act as a reservoir of ligand for TGF-beta receptors. In some embodiments, the modified signaling agent has reduced affinity and/or activity for TGFBR1 and/or TGFBR2 and/or substantially reduced or ablated affinity and/or activity for Latency Associated Peptide (LAP). In some embodiments, such chimeras find use in Camurati-Engelmann disease, or other diseases associated with inappropriate TGFβ signaling.

[0269] In some embodiments, the modified agent is a TGF family member (e.g. TGFα, TGFβ) which has reduced affinity and/or activity, i.e. antagonistic activity (e.g. natural antagonistic activity or antagonistic activity that is the result of one or more mutations, see, e.g., WO 2015/007520, the entire contents of which are hereby incorporated by reference) at one or more of TGFBR1, TGFBR2, TGFBR3. In these embodiments, the modified agent is a TGF family member (e.g. TGFα, TGFβ) which also, optionally, has substantially reduced or ablated affinity and/or activity at one or more of TGFBR1, TGFBR2, TGFBR3.

[0270] In some embodiments, the modified agent is a TGF family member (e.g. TGFα, TGFβ) which has reduced affinity and/or activity, i.e. antagonistic activity (e.g. natural antagonistic activity or antagonistic activity that is the result of one or more mutations, see, e.g., WO 2015/007520, the entire contents of which are hereby incorporated by reference) at TGFBR1 and/or TGFBR2. In these embodiments, the modified agent is a TGF family member (e.g. TGFα, TGFβ) which also, optionally, has substantially reduced or ablated affinity and/or activity at TGFBR3.

[0271] In an embodiment, the modified signaling agent is an interleukin. In an embodiment, the modified signaling agent is IL-1. In an embodiment, the modified signaling agent is IL-1a or IL-1B. In some embodiments, the modified signaling agent has reduced affinity and/or activity for IL-1R1 and/or IL-1RAcP. In some embodiments, the modified signaling agent has substantially reduced or ablated affinity and/or activity for IL-1R1 and/or IL-1RAcP. In some embodiments, the modified signaling agent has reduced affinity and/or activity for IL-1R2. In some embodiments, the modified signaling agent has substantially reduced or ablated affinity and/or activity for IL-1R2. For instance, in some embodiments, the present modified IL-1 agents avoid interaction at IL-1R2 and therefore substantially reduce its function as a decoy and/or sink for therapeutic agents.

[0272] In an embodiment, the wild type IL-1B has the amino acid sequence of SEQ ID NO:60.

[0273] IL1 is a proinflammatory cytokine and an important immune system regulator. It is a potent activator of CD4 T cell responses, increases proportion of Th17 cells and expansion of IFNγ and IL-4 producing cells. IL-1 is also a potent regulator of CD8+ T cells, enhancing antigen-specific CD8+ T cell expansion, differentiation, migration to periphery and memory. IL-1 receptors comprise IL-1R1 and IL-1R2. Binding to and signaling through the IL-1R1 constitutes the mechanism whereby IL-1 mediates many of its biological (and pathological) activities. IL1-R2 can function as a decoy receptor, thereby reducing IL-1 availability for interaction and signaling through the IL-1R1.

[0274] In some embodiments, the modified IL-1 has reduced affinity and/or activity (e.g. agonistic activity) for IL-1R1. In some embodiments, the modified IL-1 has substantially reduced or ablated affinity and/or activity for IL-1R2. In such embodiments, there is restorable IL-1/IL-1R1 signaling and prevention of loss of therapeutic chimeras at IL-R2 and therefore a reduction in dose of IL-1 that is required (e.g. relative to wild type or a chimera bearing only an attenuation mutation for IL-R1). Such constructs find use in, for example, methods of treating cancer, including, for example, stimulating the immune system to mount an anti-cancer response.

[0275] In some embodiments, the modified IL-1 has reduced affinity and/or activity (e.g. antagonistic activity, e.g. natural antagonistic activity or antagonistic activity that is the result of one or more mutations, see, e.g., WO 2015/007520, the entire contents of which are hereby incorporated by reference) for IL-1R1. In some embodiments, the modified IL-1 has substantially reduced or ablated affinity and/or activity for IL-1R2. In such embodiments, there is the IL-1/IL-1R1 signaling is not restorable and prevention of loss of therapeutic chimeras at IL-R2 and therefore a reduction in dose of IL-1 that is required (e.g. relative to wild type or a chimera bearing only an attenuation mutation for IL-R1). Such constructs find use in, for example, methods of treating autoimmune diseases, including, for example, suppressing the immune system.

[0276] In such embodiments, the modified signaling agent has a deletion of amino acids 52-54 which produces a modified human IL-1β with reduced binding affinity for type I IL-1R and reduced biological activity. See, for example, WO 1994/000491, the entire contents of which are hereby incorporated by reference. In some embodiments, the modified human IL-1β has one or more substitution mutations selected from A117G/P118G, R120X, L122A, T125G/L126G, R127G, Q130X, Q131G, K132A, S137G/Q138Y, L145G, H146X, L145A/L147A, Q148X, Q148G/Q150G, Q150G/D151A, M152G, F162A, F162A/Q164E, F166A, Q164E/E167K, N169G/D170G, I172A, V174A, K208E, K209X, K209A/K210A, K219X, E221X, E221 S/N224A, N224S/K225S, E244K, N245Q (where X can be any change in amino acid, e.g., a non-conservative change), which exhibit reduced binding to IL-1R, as described, for example, in WO2015/007542 and WO/2015/007536, the entire contents of which is hereby incorporated by reference (numbering base on the human IL-1 β sequence, Genbank accession number NP_000567, version NP-000567.1, GI: 10835145). In some embodiments, the modified human IL-13 may have one or more mutations selected from R120A, R120G, Q130A, Q130W, H146A, H146G, H146E, H146N, H146R, Q148E, Q148G, Q148L, K209A, K209D, K219S, K219Q, E221S and E221K. In an embodiment, the modified human IL-1β comprises the mutations Q131G and Q148G. In an embodiment, the modified human IL-1β comprises the mutations Q148G and K208E. In an embodiment, the modified human IL-1β comprises the mutations R120G and Q131G. In an embodiment, the modified human IL-1β comprises the mutations R120G and H146A. In an embodiment, the modified human IL-1β comprises the mutations R120G and H146N. In an embodiment, the modified human IL-1β comprises the mutations R120G and H146R. In an embodiment, the modified human IL-1B comprises the mutations R120G and H146E. In an embodiment, the modified human IL-1β comprises the mutations R120G and H146G. In an embodiment, the modified human IL-1β comprises the mutations R120G and K208E. In an embodiment, the modified human IL-1β comprises the mutations R120G, F162A, and Q164E.

[0277] In an embodiment, the modified signaling agent is IL-2. In such an embodiment, the modified signaling agent has reduced affinity and/or activity for IL-2Ra and/or IL-2RB and/or IL-2Ry. In some embodiments, the modified signaling agent has reduced affinity and/or activity for IL-2RB and/or IL-2Ry. In some embodiments, the modified signaling agent has substantially reduced or ablated affinity and/or activity for IL-2Ra. Such embodiments may be relevant for treatment of cancer, for instance when the modified IL-2 is agonistic at IL-2RB and/or IL-2Ry. For instance, the present constructs may favor attenuated activation of CD8+ T cells (which can provide an anti-tumor effect), which have IL2 receptors β and γ and disfavor Tregs (which can provide an immune suppressive, pro-tumor effect), which have IL2 receptors α, β, and γ. Further, in some embodiments, the preferences for IL-2RB and/or IL-2Ry over IL-2Ra avoid IL-2 side effects such as pulmonary edema. Also, IL-2-based chimeras are useful for the treatment of diseases (e.g., autoimmune disease), for instance when the modified IL-2 is antagonistic (e.g. natural antagonistic activity or antagonistic activity that is the result of one or more mutations, see, e.g., WO 2015/007520, the entire contents of which are hereby incorporated by reference) at IL-2Rβ and/or IL-2Rγ. For instance, the present constructs may favor attenuated suppression of CD8⁺ T cells (and therefore dampen the immune response), which have IL2 receptors β and γ and disfavor T_{regs} which have IL2 receptors α, β, and γ. Alternatively, in some embodiments, the chimeras bearing IL-2 favor the activation of T_{regs}, and therefore immune suppression, and activation of disfavor of CD8+ T cells. For instance, these constructs find use in the treatment of diseases or diseases that would benefit from immune suppression, e.g., autoimmune disorders.

[0278] In some embodiments, the chimeric protein or chimeric protein complex has targeting moieties as described herein directed to CD8+ T cells as well as a modified IL-2 agent having reduced affinity and/or activity for IL-2Rβ and/or IL-2Rγ and/or substantially reduced or ablated affinity and/or activity for IL-2Rα. In some embodiments, these constructs provide targeted CD8⁺ T cell activity and are generally inactive (or have substantially reduced activity) towards Treg cells. In some embodiments, such constructs have enhanced immune stimulatory effect compared to wild type IL-2 (e.g., without wishing to be bound by theory, by not stimulating T_{regs}), whilst eliminating or reducing the systemic toxicity associated with IL-2.

[0279] In an embodiment, the wild type IL-2 has the amino acid sequence of SEQ ID NO:61.

[0280] In such embodiments, the modified IL-2 agent has one or more mutations at amino acids L72 (L72G, L72A, L72S, L72T, L72Q, L72E, L72N, L72D, L72R, or L72K), F42 (F42A, F42G, F42S, F42T, F42Q, F42E, F42N, F42D, F42R, or F42K) and Y45 (Y45A, Y45G, Y45S, Y45T, Y45Q, Y45E, Y45N, Y45D, Y45R or Y45K). Without wishing to be bound by theory, it is believed that these modified IL-2 agents have reduced affinity for the high-affinity IL-2 receptor and preserves affinity to the intermediate-affinity IL-2 receptor, as compared to the wild-type IL-2. See, for example, US Patent Publication No. 2012/0244112, the entire contents of which are hereby incorporated by reference.

[0281] In some embodiments, the modified IL-2 agent has one or more mutations at amino acids R38, F42, Y45, and E62. For example, the modified IL-2 agent may comprise one or more of R38A, F42A, Y45A, and E62A. In some embodiments, the modified IL-2 agent may comprise a mutation at C125. For example, the mutation may be C125S. In such embodiments, the modified IL-2 agent may have substantially reduced affinity and/or activity for IL-2Rα, as described in, for example, Carmenate et al. (2013) The Journal of Immunology, 190:6230-6238, the entire disclosure of which is hereby incorporated by reference. In some embodiments, the modified IL-2 agent with mutations at R38, F42, Y45, and/or E62 is able to induce an expansion of effector cells including CD8+ T cells and NK cells but not Treg cells. In some embodiments, the modified IL-2 agent with mutations at R38, F42, Y45, and/or E62 is less toxic than wildtype IL-2 agents. A chimeric protein or chimeric protein complex comprising the modified IL-2 agent with substantially reduced affinity and/or activity for IL-2Ra may find application in oncology for example.

[0282] In other embodiments, the modified IL-2 agent may have substantially reduced affinity and/or activity for IL-2Rβ, as described in, for example, WO2016/025385, the entire disclosure of which is hereby incorporated by reference. In such embodiments, the modified IL-2 agent may induce an expansion of Treg cells but not effector cells such as CD8+ T cells and NK cells. A chimeric protein or chimeric protein complex comprising the modified IL-2 agent with substantially reduced affinity and/or activity for IL-2RB may find application in the treatment of autoimmune disease for example. In some embodiments, the modified IL-2 agent may comprise one or more mutations at amino acids N88, D20, and/r A126. For example, the modified IL-2 agent may comprise one or more of N88R, N881, N88G, D20H, Q126L, and Q126F.

[0283] In various embodiments, the modified IL-2 agent may comprise a mutation at D109 or C125. For example, the mutation may be D109C or C125S. In some embodiments, the modified IL-2 with a mutation at D109 or C125 may be utilized for attachment to a PEG moiety.

[0284] In an embodiment, the modified signaling agent is IL-3. In some embodiments, the modified signaling agent has reduced affinity and/or activity for the IL-3 receptor, which is a heterodimer with a unique alpha chain paired with the common beta (beta c or CD131) subunit. In some embodiments, the modified signaling agent has substantially reduced or ablated affinity and/or activity for the IL-3 receptor, which is a heterodimer with a unique alpha chain paired with the common beta (beta c or CD131) subunit.

[0285] In an embodiment, the modified signaling agent is IL-4. In such an embodiment, the modified signaling agent has reduced affinity and/or activity for type 1 and/or type 2 IL-4 receptors. In such an embodiment, the modified signaling agent has substantially reduced or ablated affinity and/or activity for type 1 and/or type 2 IL-4 receptors. Type 1 IL-4 receptors are composed of the IL-4Rα subunit with a common γ chain and specifically bind IL-4. Type 2 IL-4 receptors include an IL-4Rα subunit bound to a different subunit known as IL-13Rα1. In some embodiments, the modified signaling agent has substantially reduced or ablated affinity and/or activity the type 2 IL-4 receptors.

[0286] In an embodiment, the wild type IL-4 has the amino acid sequence of SEQ ID NO:62.

[0287] In such embodiments, the modified IL-4 agent has one or more mutations at amino acids R121 (R121A, R121D, R121E, R121F, R121H, R1211, R121K, R121N, R121P, R121T, R121W), E122 (E122F), Y124 (Y124A, Y124Q, Y124R, Y124S, Y124T) and S125 (S125A). Without wishing to be bound by theory, it is believed that these modified IL-4 agents maintain the activity mediated by the type I receptor, but significantly reduces the biological activity mediated by the other receptors. See, for example, U.S. Pat. No. 6,433,157, the entire contents of which are hereby incorporated by reference.

[0288] In an embodiment, the modified signaling agent is IL-6. IL-6 signals through a cell-surface type I cytokine receptor complex including the ligand -binding IL-6R chain (CD126), and the signal-transducing component gp 130. IL-6 may also bind to a soluble form of IL-6R (sIL-6R), which is the extracellular portion of IL-6R. The sIL-6R/IL-6 complex may be involved in neurites outgrowth and survival of neurons and, hence, may be important in nerve regeneration through remyelination. Accordingly, in some embodiments, the modified signaling agent has reduced affinity and/or activity for IL-6R/gp130 and/or sIL-6R. In some embodiments, the modified signaling agent has substantially reduced or ablated affinity and/or activity for IL-6R/gp 130 and/or sIL-6R.

[0289] In an embodiment, the wild type IL-6 has the amino acid sequence of SEQ ID NO:63.

[0290] In such embodiments, the modified signaling agent has one or more mutations at amino acids 58, 160, 163, 171 or 177. Without wishing to be bound by theory, it is believed that these modified IL-6 agents exhibit reduced binding affinity to IL-6Ralpha and reduced biological activity. See, for example, WO 97/10338, the entire contents of which are hereby incorporated by reference.

[0291] In an embodiment, the modified signaling agent is IL-10. In such an embodiment, the modified signaling agent has reduced affinity and/or activity for IL-10 receptor-1 and IL-10 receptor-2. In some embodiments, the modified signaling agent has substantially reduced or ablated affinity and/or activity for IL-10 receptor-1 and IL-10 receptor-2

[0292] In an embodiment, the modified signaling agent is IL-11. In such an embodiment, the modified signaling agent has reduced affinity and/or activity for IL-11Rα and/or IL-11Rβ and/or gp130. In such an embodiment, the modified signaling agent has substantially reduced or ablated affinity and/or activity for IL-11Rα and/or IL-11Rβ and/or gp130.

[0293] In an embodiment, the modified signaling agent is IL-12. In such an embodiment, the modified signaling agent has reduced affinity and/or activity for IL-12RB1 and/or IL-12RB2. In such an embodiment, the modified signaling agent has substantially reduced or ablated affinity and/or activity for IL-12RB1 and/or IL-12RB2.

[0294] In an embodiment, the modified signaling agent is IL-13. In such an embodiment, the modified signaling agent has reduced affinity and/or activity for the IL-4 receptor (IL-4Rα) and IL-13Ra1. In some embodiments, the modified signaling agent has substantially reduced or ablated affinity and/or activity for IL-4 receptor (IL-4Rα) or IL-13Ra1.

[0295] In an embodiment, the wild type IL-13 has the amino acid sequence of SEQ ID NO:64.

[0296] In such embodiments, the modified IL-13 agent has one or more mutations at amino acids 13, 16, 17, 66, 69, 99, 102, 104, 105, 106, 107, 108, 109, 112, 113 and 114. Without wishing to be bound by theory, it is believed that these modified IL-13 agents exhibit reduced biological activity. See, for example, WO 2002/018422, the entire contents of which are hereby incorporated by reference.

[0297] In an embodiment, the modified signaling agent is IL-18. In some embodiments, the modified signaling agent has reduced affinity and/or activity for IL-18Ra and/or IL-18RB. In some embodiments, the modified signaling agent has substantially reduced or ablated affinity and/or activity for IL-18Ra and/or IL-18RB. In some embodiments, the modified signaling agent has substantially reduced or ablated affinity and/or activity for IL-18Ra type II, which is an isoform of IL-18Ra that lacks the TIR domain required for signaling.

[0298] In an embodiment, the wild type IL-18 has the amino acid sequence of SEQ ID NO:65.

[0299] In such embodiments, the modified IL-18 agent may comprise one or more mutations in amino acids or amino acid regions selected from Y37-K44, R49-Q54, D59-R63, E67-C74, R80, M87-A97, N 127-K129, Q139-M149, K165-K171, R183 and Q190-N191, as described in WO/2015/007542, the entire contents of which are hereby incorporated by reference (numbering based on the human IL-18 sequence, Genbank accession number AAV38697, version AAV38697.1, GI: 54696650).

[0300] In an embodiment, the modified signaling agent is IL-33. In such an embodiment, the modified signaling agent has reduced affinity and/or activity for the ST-2 receptor and IL-1RAcP. In some embodiments, the modified signaling agent has substantially reduced or ablated affinity and/or activity for the ST-2 receptor and IL-1RAcP.

[0301] In an embodiment, the wild type IL-33 has the amino acid sequence of SEQ ID NO:66.

[0302] In such embodiments, the modified IL-33 agent may comprise one or more mutations in amino acids or amino acid regions selected from 1113-Y122, S127-E139, E144-D157, Y163-M183, E200, Q215, L220-C227 and T260-E269, as described in WO/2015/007542, the entire contents of which are hereby incorporated by reference (numbering based on the human sequence, Genbank accession number NP_254274, version NP_254274.1, GI: 15559209).

[0303] In an embodiment, the modified signaling agent is epidermal growth factor (EGF). EGF is a member of a family of potent growth factors. Members include EGF, HB-EGF, and others such as TGFalpha, amphiregulin, neuregulins, epiregulin, betacellulin. EGF family receptors include EGFR (ErbB1), ErbB2, ErbB3 and ErbB4. These may function as homodimeric and/or heterodimeric receptor subtypes. The different EGF family members exhibit differential selectivity for the various receptor subtypes. For example, EGF associates with ErbB1/ErbB1, ErbB1/ErbB2, ErbB4/ErbB2 and some other heterodimeric subtypes. HB-EGF has a similar pattern, although it also associates with ErbB4/4. Modulation of EGF (EGF-like) growth factor signaling, positively or negatively, is of considerable therapeutic interest. For example, inhibition of EGFRs signaling is of interest in the treatment of various cancers where EGFR signaling constitutes a major growth promoting signal. Alternatively, stimulation of EGFRs signaling is of therapeutic interest in, for example, promoting wound healing (acute and chronic), oral mucositis (a major side-effect of various cancer therapies, including, without limitation radiation therapy).

[0304] In some embodiments, the modified signaling agent has reduced affinity and/or activity for ErbB1, ErbB2, ErbB3, and/or ErbB4. Such embodiments find use, for example, in methods of treating wounds. In some embodiments, the modified signaling agent binds to one or more ErbB1, ErbB2, ErbB3, and ErbB4 and antagonizes the activity of the receptor. In such embodiments, the modified signaling agent has reduced affinity and/or activity for ErbB1, ErbB2, ErbB3, and/or ErbB4 which allows for the activity of the receptor to be antagonized in an attenuated fashion. Such embodiments find use in, for example, treatments of cancer. In an embodiment, the modified signaling agent has reduced affinity and/or activity for ErbB1. ErbB1 is the therapeutic target of kinase inhibitors-most have side effects because they are not very selective (e.g., gefitinib, erlotinib, afatinib, brigatinib and icotinib). In some embodiments, attenuated antagonistic ErbB1 signaling is more on-target and has less side effects than other agents targeting receptors for EGF.

[0305] In some embodiments, the modified signaling agent has reduced affinity and/or activity (e.g. antagonistic e.g. natural antagonistic activity or antagonistic activity that is the result of one or more mutations, see, e.g., WO 2015/007520, the entire contents of which are hereby incorporated by reference) for ErbB1 and/or substantially reduced or ablated affinity and/or activity for ErbB4 or other subtypes it may interact with. Through specific targeting via the targeting moiety, cell-selective suppression (antagonism e.g. natural antagonistic activity or antagonistic activity that is the result of one or more mutations, see, e.g., WO 2015/007520, the entire contents of which are hereby incorporated by reference) of ErbB1/ErbB1 receptor activation would be achieved—while not engaging other receptor subtypes potentially associated with inhibition-associated side effects. Hence, in contrast to EGFR kinase inhibitors, which inhibit EGFR activity in all cell types in the body, such a construct would provide a cell-selective (e.g., tumor cell with activated EGFR signaling due to amplification of receptor, overexpression etc.) anti-EGFR (ErbB1) drug effect with reduced side effects.

[0306] In some embodiments, the modified signaling agent has reduced affinity and/or activity (e.g. agonistic) for ErbB4 and/or other subtypes it may interact with. Through targeting to specific target cells through the targeting moiety, a selective activation of ErbB1 signaling is achieved (e.g. epithelial cells). Such a construct finds use, in some embodiments, in the treatment of wounds (promoting would healing) with reduced side effects, especially for treatment of chronic conditions and application other than topical application of a therapeutic (e.g. systemic wound healing).

[0307] In an embodiment, the modified signaling agent is insulin or insulin analogs. In some embodiments, the modified insulin or insulin analog has reduced affinity and/or activity for the insulin receptor and/or IGF1 or IGF2 receptor. In some embodiments, the modified insulin or insulin analog has substantially reduced or ablated affinity and/or activity for the insulin receptor and/or IGF1 or IGF2 receptor. Attenuated response at the insulin receptor allows for the control of diabetes, obesity, metabolic disorders and the like while directing away from IGF1 or IGF2 receptor avoids pro-cancer effects.

[0308] In an embodiment, the modified signaling agent is insulin-like growth factor-I or insulin-like growth factor-II (IGF-1 or IGF-2). In an embodiment, the modified signaling agent is IGF-1. In such an embodiment, the modified signaling agent has reduced affinity and/or activity for the insulin receptor and/or IGF1 receptor. In an embodiment, the modified signaling agent may bind to the IGF1 receptor and antagonize the activity of the receptor. In such an embodiment, the modified signaling agent has reduced affinity and/or activity for IGF1 receptor which allows for the activity of the receptor to be antagonized in an attenuated fashion. In some embodiments, the modified signaling agent has substantially reduced or ablated affinity and/or activity for the insulin receptor and/or IGF1 receptor. In some embodiments, the modified signaling agent has reduced affinity and/or activity for IGF2 receptor which allows for the activity of the receptor to be antagonized in an attenuated fashion. In an embodiment, the modified signaling agent has substantially reduced or ablated affinity and/or activity for the insulin receptor and accordingly does not interfere with insulin signaling. In various embodiments, this applies to cancer treatment. In various embodiments, the present agents may prevent IR isoform A from causing resistance to cancer treatments.

[0309] In one embodiment, the present chimeric protein or chimeric protein complex has (i) a targeting moiety against Clec4C and (ii) a targeting moiety which is directed against a tumor cell, along with any of the modified or mutant signaling agents described herein. In an embodiment, the present chimeric protein or chimeric protein complex has a targeting moiety directed against Clec4C on dendritic cells and a second targeting moiety directed against PD-L1 or PD-L2 on tumor cells.

[0310] In one embodiment, the present chimeric protein or chimeric protein complex has (i) a targeting moiety against Clec4C and (ii) a targeting moiety which is directed against a checkpoint inhibitor marker, along with any of the modified or mutant interferons described herein. In an embodiment, the present chimeric protein or chimeric protein complex has a targeting moiety directed against Clec4C on dendritic cells and a second targeting moiety directed against PD-1.

[0311] In various embodiments, the signaling agent is a toxin or toxic enzyme. In some embodiments, the toxin or toxic enzyme is derived from plants and bacteria. Illustrative toxins or toxic enzymes include, but are not limited to, the diphtheria toxin, Pseudomonas toxin, anthrax toxin, ribosome-inactivating proteins (RIPs) such as ricin and saporin, modeccin, abrin, gelonin, and poke weed antiviral protein. Additional toxins include those disclosed in Mathew et al., (2009) Cancer Sci 100 (8): 1359-65, the entire disclosures are hereby incorporated by reference. In such embodiments, the chimeric proteins or chimeric protein complexes of the invention may be utilized to induce cell death in cell-type specific manner. In such embodiments, the toxin may be modified, e.g. mutated, to reduce affinity and/or activity of the toxin for an attenuated effect, as described with other signaling agents herein.

Multi-Specific Chimeras and Fusions with Signaling Agents

[0312] In various embodiments, the chimeric protein or chimeric protein complex of the invention comprises one or more signaling agents as described herein and/or one or more additional targeting moieties (i.e., in addition to the targeting moiety directed against Clec4C). Accordingly, the present invention provides for chimeric or fusion proteins that include one or more signaling agents, a targeting moiety against Clec4C, and/or one or more additional targeting moieties.

[0313] In various embodiments, the chimeric proteins or chimeric protein complexes of the present invention have targeting moieties which target two different cells (e.g. to make a synapse) or the same cell (e.g. to get a more concentrated signaling agent effect).

[0314] In various embodiments, the chimeric protein or chimeric protein complex of the invention is multispecific, i.e., the chimeric protein or chimeric protein complex comprises two or more targeting moieties having recognition domains (e.g. antigen recognition domains) that recognize and bind two or more targets (e.g. antigens, or receptors, or epitopes). In such embodiments, the chimeric protein or chimeric protein complex of the invention may comprise two more targeting moieties having recognition domains that recognize and bind two or more epitopes on the same antigen or on different antigens or on different receptors. In various embodiments, such multi-specific chimeric proteins or chimeric protein complexes exhibit advantageous properties such as increased avidity and/or improved selectivity. In an embodiment, the chimeric protein or chimeric protein complex of the invention comprises two targeting moieties and is bispecific, i.e., binds and recognizes two epitopes on the same antigen or on different antigens or different receptors.

[0315] In various embodiments, the multispecific chimeric protein or chimeric protein complex of the invention comprises two or more targeting moieties with each targeting moiety being an antibody or an antibody derivative as described herein. In an illustrative embodiment, the multispecific chimeric protein or chimeric protein complex of the invention comprises at least one antibody or antibody derivative (e.g., a VHH) comprising an antigen recognition domain against Clec4C and one antibody or antibody derivative comprising a recognition domain against a tumor antigen. In an illustrative embodiment, the multispecific chimeric protein or chimeric protein complex of the invention comprises at least one antibody or antibody derivative (e.g., a VHH) comprising an antigen recognition domain against Clec4C and one antibody or antibody derivative comprising a recognition domain against an antigen associated with a cell, tissue or organ site affected by an autoimmune disease.

[0316] In various embodiments, the present multispecific chimeric proteins or chimeric protein complexes have two or more targeting moieties that target different antigens or receptors, and one targeting moiety may be attenuated for its antigen or receptor, e.g. the targeting moiety binds its antigen or receptor with a low affinity or avidity (including, for example, at an affinity or avidity that is less than the affinity or avidity the other targeting moiety has for its for its antigen or receptor, for instance the difference between the binding affinities may be about 10-fold, or 25-fold, or 50-fold, or 100-fold, or 300-fold, or 500-fold, or 1000-fold, or 5000-fold; for instance the lower affinity or avidity targeting moiety may bind its antigen or receptor at a K_{D} in the mid- to high-nM or low- to mid-μM range while the higher affinity or avidity targeting moiety may bind its antigen or receptor at a K_{D} in the mid- to high-pM or low- to mid-nM range). For instance, in some embodiments, the present multispecific chimeric protein or chimeric protein complex comprises an attenuated targeting moiety that is directed against a promiscuous antigen or receptor, which may improve targeting to a cell of interest (e.g. via the other targeting moiety) and prevent effects across multiple types of cells, including those not being targeted for therapy (e.g. by binding promiscuous antigen or receptor at a higher affinity than what is provided in these embodiments).

[0317] The multispecific chimeric protein or chimeric protein complex of the invention may be constructed using methods known in the art, see for example, U.S. Pat. No. 9,067,991, U.S. Patent Publication No. 20110262348 and WO 2004/041862, the entire contents of which are hereby incorporated by reference. In an illustrative embodiment, the multispecific chimeric protein or chimeric protein complex of the invention comprising two or more targeting moieties may be constructed by chemical crosslinking, for example, by reacting amino acid residues with an organic derivatizing agent as described by Blattler et al., Biochemistry 24, 1517-1524 and EP294703, the entire contents of which are hereby incorporated by reference. In another illustrative embodiment, the multispecific chimeric protein or chimeric protein complex comprising two or more targeting moieties is constructed by genetic fusion, i.e., constructing a single polypeptide which includes the polypeptides of the individual targeting moieties. For example, a single polypeptide construct may be formed which encodes a first antibody or antibody derivative (e.g., a VHH) with an antigen recognition domain against Clec4C and a second antibody or antibody derivative with a recognition domain against a tumor antigen. A method for producing bivalent or multivalent VHH polypeptide constructs is disclosed in PCT patent application WO 96/34103, the entire contents of which is hereby incorporated by reference. In a further illustrative embodiment, the multispecific chimeric protein or chimeric protein complex of the invention may be constructed by using linkers. For example, the carboxy-terminus of a first antibody or antibody derivative (e.g., a VHH) with an antigen recognition domain against Clec4C may be linked to the amino-terminus of a second antibody or antibody derivative with a recognition domain against a tumor antigen (or vice versa). Illustrative linkers that may be used are described herein. In some embodiments, the components of the multispecific chimeric protein or chimeric protein complex of the invention are directly linked to each other without the use of linkers.

[0318] In various embodiments, the multi-specific chimeric protein or chimeric protein complex of the invention recognizes and binds to Clec4C and one or more antigens found on one or more immune cells, which can include, without limitation, megakaryocytes, thrombocytes, erythrocytes, mast cells, basophils, neutrophils, eosinophils, monocytes, macrophages, natural killer cells, T lymphocytes (e.g., cytotoxic T lymphocytes, T helper cells, natural killer T cells), B lymphocytes, plasma cells, dendritic cells, or subsets thereof. In some embodiments, the chimeric protein or chimeric protein complex specifically binds to an antigen of interest and effectively directly or indirectly recruits one of more immune cells.

[0319] In various embodiments, the multi-specific chimeric protein or chimeric protein complex of the invention recognizes and binds to Clec4C and one or more antigens found on tumor cells. In these embodiments, the present chimeric protein or chimeric protein complex may directly or indirectly recruit an immune cell (e.g., a macrophage) to a tumor cell or the tumor microenvironment. In such embodiments, the present chimeric protein or chimeric protein complex enhances phagocytosis of tumor cells by dendritic cells.

[0320] In various embodiments, the multi-specific chimeric protein or chimeric protein complex of the invention recognizes and binds to Clec4C and one or more antigens found on one or more cells, tissues, and organ sites affected by autoimmune disease. In these embodiments, the present chimeric protein or chimeric protein complex may directly or indirectly recruit an immune cell (e.g., a macrophage) to a cell, tissue, or organ site affected by autoimmune disease. In such embodiments, the chimeric protein or chimeric protein complex specifically binds to an antigen of interest found on one or more cells, tissues, and organ sites affected by autoimmune disease and effectively directly or indirectly recruits one of more immune cells. In some embodiments, the present chimeric proteins or chimeric protein complexes are capable of, or find use in methods involving, shifting the balance of immune cells in favor of immune attack of a tumor. For instance, the present chimeric protein or chimeric protein complex can shift the ratio of immune cells at a site of clinical importance in favor of cells that can kill and/or suppress a tumor (e.g. anti-tumor macrophages (e.g. M1 macrophages), T cells, cytotoxic T lymphocytes, T helper cells, natural killer (NK) cells, natural killer T (NKT) cells, B cells, and dendritic cells) and in opposition to cells that protect tumors (e.g. myeloid-derived suppressor cells (MDSCs), regulatory T cells (Tregs); tumor associated neutrophils (TANs), M2 macrophages, tumor associated macrophages (TAMs), or subsets thereof). In some embodiments, the present chimeric protein or chimeric protein complex is capable of increasing a ratio of effector T cells to regulatory T cells.

[0321] In some embodiments, the multi-specific chimeric protein or chimeric protein complex of the invention comprises a targeting moiety having a recognition domain that specifically binds to a target (e.g. antigen or receptor) associated with tumor cells. In some embodiments, the targeting moiety directly or indirectly recruits tumor cells. For instance, in some embodiments, the recruitment of the tumor cell is to one or more effector cell (e.g. a macrophage) that can phagocytose, kill, and/or suppress the tumor cell.

[0322] Tumor cells, or cancer cells refer to an uncontrolled growth of cells or tissues and/or an abnormal increased in cell survival and/or inhibition of apoptosis which interferes with the normal functioning of bodily organs and systems. For example, tumor cells include benign and malignant cancers, polyps, hyperplasia, as well as dormant tumors or micrometastases. Illustrative tumor cells include, but are not limited to cells of: basal cell carcinoma, biliary tract cancer; bladder cancer; bone cancer; brain and central nervous system cancer; breast cancer; cancer of the peritoneum; cervical cancer; choriocarcinoma; colon and rectum cancer; connective tissue cancer; cancer of the digestive system; endometrial cancer; esophageal cancer; eye cancer; cancer of the head and neck; gastric cancer (including gastrointestinal cancer); glioblastoma; hepatic carcinoma; hepatoma; intra-epithelial neoplasm; kidney or renal cancer; larynx cancer; leukemia; liver cancer; lung cancer (e.g., small-cell lung cancer, non-small cell lung cancer, adenocarcinoma of the lung, and squamous carcinoma of the lung); melanoma; myeloma; neuroblastoma; oral cavity cancer (lip, tongue, mouth, and pharynx); ovarian cancer; pancreatic cancer; prostate cancer; retinoblastoma; rhabdomyosarcoma; rectal cancer; cancer of the respiratory system; salivary gland carcinoma; sarcoma; skin cancer; squamous cell cancer; stomach cancer; testicular cancer; thyroid cancer; uterine or endometrial cancer; cancer of the urinary system; vulval cancer; lymphoma including Hodgkin's and non-Hodgkin's lymphoma, as well as B-cell lymphoma (including low grade/follicular non-Hodgkin's lymphoma (NHL); small lymphocytic (SL) NHL; intermediate grade/follicular NHL; intermediate grade diffuse NHL; high grade immunoblastic NHL; high grade lymphoblastic NHL; high grade small non-cleaved cell NHL; bulky disease NHL; mantle cell lymphoma; AIDS-related lymphoma; and Waldenstrom's Macroglobulinemia; chronic lymphocytic leukemia (CLL); acute lymphoblastic leukemia (ALL); Hairy cell leukemia; chronic myeloblastic leukemia; as well as other carcinomas and sarcomas; and post-transplant lymphoproliferative disorder (PTLD), as well as abnormal vascular proliferation associated with phakomatoses, edema (e.g. that associated with brain tumors), and Meigs' syndrome.

[0323] Tumor cells, or cancer cells also include, but are not limited to, carcinomas, e.g. various subtypes, including, for example, adenocarcinoma, basal cell carcinoma, squamous cell carcinoma, and transitional cell carcinoma), sarcomas (including, for example, bone and soft tissue), leukemias (including, for example, acute myeloid, acute lymphoblastic, chronic myeloid, chronic lymphocytic, and hairy cell), lymphomas and myelomas (including, for example, Hodgkin and non-Hodgkin lymphomas, light chain, non-secretory, MGUS, and plasmacytomas), and central nervous system cancers (including, for example, brain (e.g. gliomas (e.g. astrocytoma, oligodendroglioma, and ependymoma), meningioma, pituitary adenoma, and neuromas, and spinal cord tumors (e.g. meningiomas and neurofibroma).

[0324] Illustrative tumor antigens include, but are not limited to, MART-1/Melan-A, gp100, Dipeptidyl peptidase IV (DPPIV), adenosine deaminase-binding protein (ADAbp), cyclophilin b, Colorectal associated antigen (CRC)-0017-1A/GA733, Carcinoembryonic Antigen (CEA) and its immunogenic epitopes CAP-1 and CAP-2, etv6, aml1, Prostate Specific Antigen (PSA) and its immunogenic epitopes PSA-1, PSA-2, and PSA-3, prostate-specific membrane antigen (PSMA), T-cell receptor/CD3-zeta chain, MAGE-family of tumor antigens (e.g., MAGE-A1, MAGE-A2, MAGE-A3, MAGE-A4, MAGE-A5, MAGE-A6, MAGE-A7, MAGE-A8, MAGE-A9, MAGE-A10, MAGE-A11, MAGE-A12, MAGE-Xp2 (MAGE-B2), MAGE-Xp3 (MAGE-B3), MAGE-Xp4 (MAGE-B4), MAGE-C1, MAGE-C2, MAGE-C3, MAGE-C4, MAGE-C5), GAGE-family of tumor antigens (e.g., GAGE-1, GAGE-2, GAGE-3, GAGE-4, GAGE-5, GAGE-6, GAGE-7, GAGE-8, GAGE-9), BAGE, RAGE, LAGE-1, NAG, GnT-V, MUM-1, CDK4, tyrosinase, p53, MUC family, HER2/neu, p21ras, RCAS1, a-fetoprotein, E-cadherin, a-catenin, β-catenin and y-catenin, p120ctn, gp100 Pmel117, PRAME, NY-ESO-1, cdc27, adenomatous polyposis coli protein (APC), fodrin, Connexin 37, Ig-idiotype, p15, gp75, GM2 and GD2 gangliosides, viral products such as human papilloma virus proteins, Smad family of tumor antigens, Imp-1, NA, EBV-encoded nuclear antigen (EBNA)-1, brain glycogen phosphorylase, SSX-1, SSX-2 (HOM-MEL-40), SSX-1, SSX-4, SSX-5, SCP-1 CT-7, c-erbB-2, CD19, CD20, CD22, CD30, CD33, CD37, CD56, CD70, CD74, CD138, AGS16, MUC1, GPNMB, Ep-CAM, PD-L1, PD-L2, PMSA, and BCMA(TNFRSF17). In various embodiments, the chimeric protein or chimeric protein complex comprises a targeting moiety that binds one or more of these tumor antigens.

[0325] In some embodiments, the present multi-specific chimeric protein or chimeric protein complex recognizes and binds to Clec4C as well as an antigen on a tumor cell.

[0326] In some embodiments, the multi-specific chimeric protein or chimeric protein complex of the invention comprises a targeting moiety having a recognition domain that specifically binds to a target (e.g. an antigen or receptor) associated with T cells. In some embodiments, the targeting moiety directly or indirectly recruits T cells. In an embodiment, the antigen recognition domains specifically bind to effector T cells. In some embodiments, the antigen recognition domain directly or indirectly recruits effector T cells, e.g., in some embodiments, to a therapeutic site (e.g. a locus with one or more disease cell or cell to be modulated for a therapeutic effect). Illustrative effector T cells include cytotoxic T cells (e.g. αβ TCR, CD3⁺, CD8⁺, CD45RO⁺); CD4⁺ effector T cells (e.g. αβ TCR, CD3⁺, CD4⁺, CCR7⁺, CD62Lhi, IL⁻7R/CD127⁺); CD8⁺ effector T cells (e.g. αβ TCR, CD3⁺, CD8⁺, CCR7⁺, CD62Lhi, IL⁻7R/CD127⁺); effector memory T cells (e.g. CD62Llow, CD44⁺, TCR, CD3⁺, IL-7R/CD127⁺, IL-15R⁺, CCR7low); central memory T cells (e.g. CCR7⁺, CD62L⁺, CD27⁺; or CCR7hi, CD44⁺, CD62Lhi, TCR, CD3⁺, IL-7R/CD127⁺, IL-15R⁺); CD62L⁺ effector T cells; CD8⁺ effector memory T cells (TEM) including early effector memory T cells (CD27⁺CD62L⁻) and late effector memory T cells (CD27⁻CD62L⁻) (TemE and TemL, respectively); CD127(+) CD25(low/−) effector T cells; CD127(−) CD25(−) effector T cells; CD8⁺ stem cell memory effector cells (TSCM)(e.g. CD44(low) CD62L(high) CD122(high) sca(+)); TH1 effector T-cells (e.g. CXCR3⁺, CXCR6⁺ and CCR5⁺; or αβ TCR, CD3⁺, CD4⁺, IL-12R⁺, IFNyR⁺, CXCR3⁺), TH2 effector T cells (e.g. CCR3⁺, CCR4⁺ and CCR8⁺; or aβ TCR, CD3⁺, CD4⁺, IL-4R⁺, IL-33R⁺, CCR4⁺, IL-17RB⁺, CRTH2⁺); TH9 effector T cells (e.g. αβ TCR, CD3⁺, CD4⁺); TH17 effector T cells (e.g. αβ TCR, CD3⁺, CD4⁺, IL-23R⁺, CCR6⁺, IL-1R⁺); CD4⁺CD45RO⁺CCR7⁺ effector T cells, ICOS⁺ effector T cells; CD4⁺CD45RO⁺CCR7 (−) effector T cells; and effector T cells secreting IL-2, IL-4 and/or IFN-γ.

[0327] Illustrative T cell antigens of interest include, for example (and inclusive of the extracellular domains, where applicable): CD8, CD3, SLAMF4, IL-2Rα, 4-1BB/TNFRSF9, IL-2 R β, ALCAM, B7-1, IL-4 R, B7-H3, BLAME/SLAMFS, CEACAM1, IL-6 R, CCR3, IL-7 Rα, CCR4, CXCRI/IL-S RA, CCR5, CCR6, IL-10R a, CCR 7, IL-10 R β, CCRS, IL-12 R β1, CCR9, IL-12 R B 2, CD2, IL-13 R α 1, IL-13, CD3, CD4, ILT2/CDS5j, ILT3/CDS5k, ILT4/CDS5d, ILT5/CDS5a, lutegrin α 4/CD49d, CDS, Integrin a E/CD103, CD6, Integrin a M/CD 11 b, CDS, Integrin a X/CD11c, Integrin β 2/CDIS, KIR/CD15S, CD27/TNFRSF7, KIR2DL1, CD2S, KIR2DL3, CD30/TNFRSFS, KIR2DL4/CD15Sd, CD31/PECAM-1, KIR2DS4, CD40 Ligand/TNFSF5, LAG-3, CD43, LAIR1, CD45, LAIR2, CDS3, Leukotriene B4-R1, CDS4/SLAMF5, NCAM-L1, CD94, NKG2A, CD97, NKG2C, CD229/SLAMF3, NKG2D, CD2F-10/SLAMF9, NT-4, CD69, NTB-A/SLAMF6, Common γ Chain/IL-2 R Y, Osteopontin, CRACC/SLAMF7, PD-1, CRTAM, PSGL-1, CTLA-4, RANK/TNFRSF11A, CX3CR1, CX3CL1, L-Selectin, CXCR3, SIRP B 1, CXCR4, SLAM, CXCR6, TCCR/WSX-1, DNAM-1, Thymopoietin, EMMPRIN/CD147, TIM-1, EphB6, TIM-2, Fas/TNFRSF6, TIM-3, Fas Ligand/TNFSF6, TIM-4, Fcγ RIII/CD16, TIM-6, TNFR1/TNFRSF1A, Granulysin, TNF RIII/TNFRSF1B, TRAIL RI/TNFRSFIOA, ICAM-1/CD54, TRAIL R2/TNFRSF10B, ICAM-2/CD102, TRAILR3/TNFRSF10C, IFN-γR1, TRAILR4/TNFRSF10D, IFN-γ R2, TSLP, IL-1 R1 and TSLP R. In various embodiments, the chimeric protein or chimeric protein complex comprises a targeting moiety that binds one or more of these illustrative T cell antigens.

[0328] By way of non-limiting example, in various embodiments, the present chimeric protein or chimeric protein complex has a targeting moiety directed against a checkpoint marker expressed on a T cell, e.g. one or more of PD-1, CD28, CTLA4, ICOS, BTLA, KIR, LAG3, CD137, OX40, CD27, CD40L, TIM3, and A2aR.

[0329] In some embodiments, the multi-specific chimeric protein or chimeric protein complex of the invention comprises a targeting moiety having a recognition domain that specifically binds to a target (e.g. an antigen or receptor) associated with B cells. In some embodiments, the targeting moiety directly or indirectly recruits B cells, e.g., in some embodiments, to a therapeutic site (e.g. a locus with one or more disease cell or cell to be modulated for a therapeutic effect). Illustrative B cell antigens of interest include, for example, CD10, CD19, CD20, CD21, CD22, CD23, CD24, CD37, CD38, CD39, CD40, CD72, CD73, CD74, CDw75, CDw76, CD77, CD78, CD79a/b, CD80, CD81, CD82, CD83, CD84, CD85, CD86, CD89, CD98, CD126, CD127, CDw130, CD 138 and CDw150. In various embodiments, the chimeric protein or chimeric protein complex comprises a targeting moiety that binds one or more of these illustrative B cell antigens.

[0330] In some embodiments, the multi-specific chimeric protein or chimeric protein complex of the invention comprises a targeting moiety having a recognition domain that specifically binds to a target (e.g. an antigen or receptor) associated with Natural Killer cells. In some embodiments, the targeting moiety directly or indirectly recruits Natural Killer cells, e.g., in some embodiments, to a therapeutic site (e.g. a locus with one or more disease cell or cell to be modulated for a therapeutic effect). Illustrative Natural Killer cell antigens of interest include, for example TIGIT, 2B4/SLAMF4, KIR2DS4, CD155/PVR, KIR3DL1, CD94, LMIR1/CD300A, CD69, LMIR2/CD300c, CRACC/SLAMF7, LMIR3/CD300LF, Kir1alpha, DNAM-1, LMIR5/CD300LB, Fc-epsilon RII, LMIR6/CD300LE, Fc-Y RI/CD64, MICA, Fc-y RIIB/CD32b, MICB, Fc-y RIIC/CD32c, MULT-1, Fc-y RIIA/CD32a, Nectin-2/CD112, Fc-y RIII/CD16, NKG2A, FcRH1/IRTA5, NKG2C, FcRH2/IRTA4, NKG2D, FcRH4/IRTA1, NKp30, FcRH5/IRTA2, NKp44, Fc-Receptor-like 3/CD16-2, NKp46/NCR1, NKp80/KLRF1, NTB-A/SLAMF6, Rae-1, Rae-1 α, Rae-1 β, Rae-1 delta, H60, Rae-1 epsilon, ILT2/CD85j, Rae-1 γ, ILT3/CD85k, TREM-1, ILT4/CD85d, TREM-2, ILT5/CD85a, TREM-3, KIR/CD158, TREML1/TLT-1, KIR2DL1, ULBP-1, KIR2DL3, ULBP-2, KIR2DL4/CD158d and ULBP-3. In various embodiments, the chimeric protein or chimeric protein complex comprises a targeting moiety that binds one or more of these illustrative NK cell antigens.

[0331] In some embodiments, the multi-specific chimeric protein or chimeric protein complex of the invention comprises a targeting moiety having a recognition domain that specifically binds to a target (e.g. an antigen or receptor) associated with macrophages/monocytes. In some embodiments, the targeting moiety directly or indirectly directly or indirectly recruits macrophages/monocytes, e.g., in some embodiments, to a therapeutic site (e.g. a locus with one or more disease cell or cell to be modulated for a therapeutic effect). Illustrative macrophages/monocyte antigens of interest include, for example SIRP1a, B7-1/CD80, ILT4/CD85d, B7-H1, ILT5/CD85a, Common β Chain, Integrin α 4/CD49d, BLAME/SLAMF8, Integrin α X/CDIIc, CCL6/C10, Integrin β 2/CD18, CD155/PVR, Integrin β 3/CD61, CD31/PECAM-1, Latexin, CD36/SR-B3, Leukotriene B4 R1, CD40/TNFRSF5, LIMPIIISR-B2, CD43, LMIR1/CD300A, CD45, LMIR2/CD300c, CD68, LMIR3/CD300LF, CD84/SLAMF5, LMIR5/CD300LB, CD97, LMIR6/CD300LE, CD163, LRP-1, CD2F-10/SLAMF9, MARCO, CRACC/SLAMF7, MD-1, ECF-L, MD-2, EMMPRIN/CD147, MGL2, Endoglin/CD105, Osteoactivin/GPNMB, Fc-y RI/CD64, Osteopontin, Fc-y RIIB/CD32b, PD-L2, Fc-y RIIC/CD32c, Siglec-3/CD33, Fc-y RIIA/CD32a, SIGNR1/CD209, Fc-y RIII/CD16, SLAM, GM-CSF R a, TCCR/WSX-1, ICAM-2/CD102, TLR3, IFN-γ RI, TLR4, IFN-gannna R2, TREM-I, IL-I RII, TREM-2, ILT2/CD85], TREM-3, ILT3/CD85k, TREML1/TLT-1, 2B4/SLAMF 4, IL-10 R a, ALCAM, IL-10 R B, AminopeptidaseN/ANPEP, ILT2/CD85j, Common β Chain, ILT3/CD85k, Clq R1/CD93, ILT4/CD85d, CCR1, ILT5/CD85a, CCR2, CD206, Integrin α 4/CD49d, CCR5, Integrin α M/CDII b, CCR8, Integrin α X/CDIIc, CD155/PVR, Integrin β 2/CD18, CD14, Integrin β 3/CD61, CD36/SR-B3, LAIR1, CD43, LAIR2, CD45, Leukotriene B4-R1, CD68, LIMPIIISR-B2, CD84/SLAMF5, LMIR1/CD300A, CD97, LMIR2/CD300c, CD163, LMIR3/CD300LF, Coagulation Factor III/Tissue Factor, LMIR5/CD300LB, CX3CR1, CX3CL1, LMIR6/CD300LE, CXCR4, LRP-1, CXCR6, M-CSF R, DEP-1/CD148, MD-1, DNAM-1, MD-2, EMMPRIN/CD147, MMR, Endoglin/CD105, NCAM-L1, Fc-y RI/CD64, PSGL-1, Fc-y RIIIICD16, RP105, G-CSF R, L-Selectin, GM-CSF R a, Siglec-3/CD33, HVEM/TNFRSF14, SLAM, ICAM-1/CD54, TCCR/WSX-1, ICAM-2/CD102, TREM-I, IL-6 R, TREM-2, CXCRI/IL-8 RA, TREM-3 and TREMLI/TLT-1. In various embodiments, the chimeric protein or chimeric protein complex comprises a targeting moiety that binds one or more of these illustrative macrophage/monocyte antigens.

[0332] In some embodiments, the multi-specific chimeric protein or chimeric protein complex of the invention comprises a targeting moiety having a recognition domain that specifically binds to a target (e.g. an antigen or receptor) associated with dendritic cells. In some embodiments, the targeting moiety directly or indirectly recruits dendritic cells, e.g., in some embodiments, to a therapeutic site (e.g. a locus with one or more disease cell or cell to be modulated for a therapeutic effect). Illustrative dendritic cell antigens of interest include, for example, Clec4C, Clec9A, XCR1, RANK, CD36/SRB3, LOX-1/SR-E1, CD68, MARCO, CD163, SR-A1/MSR, CD5L, SREC-1, CL-PI/COLEC12, SREC-II, LIMPIIISRB2, RP105, TLR4, TLR1, TLR5, TLR2, TLR6, TLR3, TLR9, 4-IBB Ligand/TNFSF9, IL-12/IL-23 p40, 4-Amino-1,8-naphthalimide, ILT2/CD85j, CCL21/6Ckine, ILT3/CD85k, 8-oxo-dG, ILT4/CD85d, 8D6A, ILT5/CD85a, A2B5, lutegrin a 4/CD49d, Aag, Integrin @ 2/CD18, AMICA, Langerin, B7-2/CD86, Leukotriene B4 RI, B7-H3, LMIR1/CD300A, BLAME/SLAMF8, LMIR2/CD300c, Clq R1/CD93, LMIR3/CD300LF, CCR6, LMIR5/CD300LB CCR7, LMIR6/CD300LE, CD40/TNFRSF5, MAG/Siglec-4-a, CD43, MCAM, CD45, MD-1, CD68, MD-2, CD83, MDL-1/CLEC5A, CD84/SLAMF5, MMR, CD97, NCAMLI, CD2F-10/SLAMF9, Osteoactivin GPNMB, Chern 23, PD-L2, CLEC-1, RP105, CLEC-2, CLEC-8, Siglec-2/CD22, CRACC/SLAMF7, Siglec-3/CD33, DC-SIGN, DCE205, Siglec-5, DC-SIGNR/CD299, Siglec-6, DCAR, Siglec-7, DCIR/CLEC4A, Siglec-9, DEC-205, Siglec-10, Dectin-1/CLEC7A, Siglec-F, Siglec-H, Dectin-2/CLEC6A, SIGNR1/CD209, DEP-1/CD148, SIGNR4, DLEC, SLAM, EMMPRIN/CD147, TCCR/WSX-1, Fc-y R1/CD64, TLR3, Fc-γ RIIB/CD32b, TREM-1, Fc-γ RIIC/CD32c, TREM-2, Fc-γ RIIA/CD32a, TREM-3, Fc-γ RIII/CD 16, TREML 1/TLT-1, ICAM-2/CD102 and Vanilloid R1. In various embodiments, the chimeric protein or chimeric protein complex comprises a targeting moiety that binds one or more of these illustrative DC antigens.

[0333] In some embodiments, the multi-specific chimeric protein or chimeric protein complex of the invention comprises a targeting moiety having a recognition domain that specifically binds to a target (e.g. an antigen or receptor) associated with immune cells selected from, but not limited to, megakaryocytes, thrombocytes, erythrocytes, mast cells, basophils, neutrophils, eosinophils, or subsets thereof. In some embodiments, the antigen recognition domains directly or indirectly recruit megakaryocytes, thrombocytes, erythrocytes, mast cells, basophils, neutrophils, eosinophils, or subsets thereof, e.g., in some embodiments, to a therapeutic site (e.g. a locus with one or more disease cell or cell to be modulated for a therapeutic effect).

[0334] In some embodiments, the multi-specific chimeric protein or chimeric protein complex of the invention comprises a targeting moiety having a recognition domain that specifically binds to a target (e.g. an antigen or receptor) associated with megakaryocytes and/or thrombocytes. Illustrative megakaryocyte and/or thrombocyte antigens of interest include, for example, GP IIb/IIIa, GPlb, vWF, PF4, and TSP. In various embodiments, the chimeric protein or chimeric protein complex comprises a targeting moiety that binds one or more of these illustrative megakaryocyte and/or thrombocyte antigens.

[0335] In some embodiments, the multi-specific chimeric protein or chimeric protein complex of the invention comprises a targeting moiety having a recognition domain that specifically binds to a target (e.g. an antigen or receptor) associated with erythrocytes. Illustrative erythrocyte antigens of interest include, for example, CD34, CD36, CD38, CD41a (platelet glycoprotein IIb/IIIa), CD41b (GPIIb), CD71 (transferrin receptor), CD105, glycophorin A, glycophorin C, c-kit, HLA-DR, H2 (MHC-II), and Rhesus antigens. In various embodiments, the chimeric protein or chimeric protein complex comprises a targeting moiety that binds one or more of these illustrative erythrocyte antigens.

[0336] In some embodiments, the multi-specific chimeric protein or chimeric protein complex of the invention comprises a targeting moiety having a recognition domain that specifically binds to a target (e.g. an antigen or receptor) associated with mast cells. Illustrative mast cells antigens of interest include, for example, SCFR/CD117, Fc_{ε}RI, CD2, CD25, CD35, CD88, CD203c, C5R1, CMAI, FCERIA, FCER2, TPSABI. In various embodiments, the chimeric protein or chimeric protein complex comprises a targeting moiety that binds one or more of these mast cell antigens.

[0337] In some embodiments, the multi-specific chimeric protein or chimeric protein complex of the invention comprises a targeting moiety having a recognition domain that specifically binds to a target (e.g. an antigen or receptor) associated with basophils. Illustrative basophils antigens of interest include, for example, F_{ε}RI, CD203c, CD123, CD13, CD107a, CD107b, and CD164. In various embodiments, the chimeric protein or chimeric protein complex comprises a targeting moiety that binds one or more of these basophil antigens.

[0338] In some embodiments, the multi-specific chimeric protein or chimeric protein complex of the invention comprises a targeting moiety having a recognition domain that specifically binds to a target (e.g. an antigen or receptor) associated with neutrophils. Illustrative neutrophils antigens of interest include, for example, 7D5, CD10/CALLA, CD13, CD16 (FcRIII), CD18 proteins (LFA-1, CR3, and p150, 95), CD45, CD67, and CD177. In various embodiments, the chimeric protein or chimeric protein complex comprises a targeting moiety that binds one or more of these neutrophil antigens.

[0339] In some embodiments, the multi-specific chimeric protein or chimeric protein complex of the invention comprises a targeting moiety having a recognition domain that specifically binds to a target (e.g. an antigen or receptor) associated with eosinophils. Illustrative eosinophils antigens of interest include, for example, CD35, CD44 and CD69. In various embodiments, the chimeric protein or chimeric protein complex comprises a targeting moiety that binds one or more of these eosinophil antigens.

[0340] In various embodiments, the multi-specific chimeric protein or chimeric protein complex of the invention comprises a targeting moiety having a recognition domain that specifically binds to an appropriate antigen or cell surface marker known by the skilled artisan. In some embodiments, the antigen or cell surface marker is a tissue-specific marker. Illustrative tissue-specific markers include, but are not limited to, endothelial cell surface markers such as ACE, CD14, CD34, CDH5, ENG, ICAM2, MCAM, NOS3, PECAMI, PROCR, SELE, SELP, TEK, THBD, VCAMI, VWF; smooth muscle cell surface markers such as ACTA2, MYHIO, MYHI 1, MYH9, MYOCD; fibroblast (stromal) cell surface markers such as ALCAM, CD34, COLIAI, COL1A2, COL3A1, FAP, PH-4; epithelial cell surface markers such as CDID, K6IRS2, KRTIO, KRT13, KRT17, KRT18, KRT19, KRT4, KRT5, KRT8, MUCI, TACSTDI; neovasculature markers such as CD13, TFNA, Alpha-v beta-3 (aVB3), E-selectin; and adipocyte surface markers such as ADIPOQ, FABP4, and RETN. In various embodiments, the chimeric protein or chimeric protein complex comprises a targeting moiety that binds one or more of these antigens. In various embodiments, a targeting moiety of the chimeric protein or chimeric protein complex binds one or more of cells having these antigens.

[0341] In various embodiments, the multi-specific chimeric protein or chimeric protein complex of the invention has one or more targeting moieties directed against a checkpoint marker, e.g. one or more of PD-1/PD-L1 or PD-L2, CD28/CD80 or CD86, CTLA4/CD80 or CD86, ICOS/ICOSL or B7RP1, BTLA/HVEM, KIR, LAG3, CD137/CD137L, OX40/OX40L, CD27, CD40L, TIM3/Gal9, and A2aR.

[0342] By way of non-limiting example, in various embodiments, the present chimeric protein or chimeric protein complex has a targeting moiety directed against (i) a checkpoint marker expressed on a T cell, e.g. one or more of PD-1, CD28, CTLA4, ICOS, BTLA, KIR, LAG3, CD137, OX40, Cd27, CD40L, TIM3, and A2aR and (ii) a targeting moiety is directed against a tumor cell, along with any of the modified (e.g. mutant) signaling agents described herein.

[0343] In various embodiments, the present multi-specific chimeric protein or chimeric protein complex has one or more targeting moieties directed against PD-1. In some embodiments, the chimeric protein or chimeric protein complex has one or more targeting moieties which selectively bind a PD-1 polypeptide. In some embodiments, the chimeric protein or chimeric protein complex comprises one or more antibodies, antibody derivatives or formats, peptides or polypeptides, or fusion proteins that selectively bind a PD-1 polypeptide.

[0344] In various embodiments, the PD-1 targeting moiety is a protein-based agent capable of specific binding to PD-1. In various embodiments, the PD-1 targeting moiety is a protein-based agent capable of specific binding to PD-1 without functional modulation (e.g., partial or full neutralization) of PD-1.

[0345] Programmed cell death protein 1, also known as PD-1 and cluster of differentiation 279 (CD279), is a cell surface receptor that is primarily expressed on activated T cells, B cells, and macrophages. PD-1 has been shown to negatively regulate antigen receptor signaling upon engagement of its ligands (i.e., PD-L1 and/or PD-L2). PD-1 plays an important role in down-regulating the immune system and promoting self tolerance by suppressing T cell inflammatory activity. PD-1 is a type I transmembrane glycoprotein containing an Ig Variable-type (V-type) domain responsible for ligand binding and a cytoplasmic tail that is responsible for the binding of signaling molecules. The cytoplasmic tail of PD-1 contains two tyrosine-based signaling motifs, an ITIM (immunoreceptor tyrosine-based inhibition motif) and an ITSM (immunoreceptor tyrosine-based switch motif).

[0346] In various embodiments, the PD-1 targeting moiety comprises an antigen recognition domain that recognizes an epitope present on PD-1. In an embodiment, the antigen-recognition domain recognizes one or more linear epitopes present on PD-1. As used herein, a linear epitope refers to any continuous sequence of amino acids present on PD-1. In another embodiment, the antigen-recognition domain recognizes one or more conformational epitopes present on PD-1. As used herein, a conformation epitope refers to one or more sections of amino acids (which may be discontinuous) which form a three-dimensional surface with features and/or shapes and/or tertiary structures capable of being recognized by an antigen recognition domain.

[0347] In various embodiments, the PD-1 targeting moiety binds to the full-length and/or mature forms and/or isoforms and/or splice variants and/or fragments and/or any other naturally occurring or synthetic analogs, variants, or mutants of human PD-1. In various embodiments, the PD-1 targeting moiety binds to any forms of the human PD-1. In an embodiment, the PD-1 targeting moiety binds to a phosphorylated form of PD-1.

[0348] In an embodiment, the PD-1 targeting moiety comprises an antigen recognition domain that recognizes one or more epitopes present on human PD-1. In an embodiment, the human PD-1 comprises the amino acid sequence of (signal peptide underlined):

(SEQ ID NO: 332)
MQIPQAPWPVVWAVLQLGWRPGWFLDSPDRPWNPPTFSPALLVVTEGDNAT
FTCSFSNTSESFVLNWYRMSPSNQTDKLAAFPEDRSQPGQDCRFRVTQLPN
GRDFHMSVVRARRNDSGTYLCGAISLAPKAQIKESLRAELRVTERRAEVPT
AHPSPSPRPAGQFQTLVVGVVGGLLGSLVLLVWVLAVICSRAARGTIGARR
TGQPLKEDPSAVPVFSVDYGELDFQWREKTPEPPVPCVPEQTEYATIVFPS
GMGTSSPARRGSADGPRSAQPLRPEDGHCSWPL.

[0349] In another embodiment, the human PD-1 comprises the amino acid sequence of SEQ ID NO: 332 without the amino-terminal signal peptide.

[0350] In various embodiments, the PD-1 targeting moiety is capable of specific binding. In various embodiments, the PD-1 targeting moiety comprises an antigen recognition domain such as an antibody or derivatives thereof. In an embodiment, the PD-1 targeting moiety is an antibody. In various embodiments, the antibody is a full-length multimeric protein that includes two heavy chains and two light chains. Each heavy chain includes one variable region (e.g., V_{H}) and at least three constant regions (e.g., CH1, CH2 and CH3), and each light chain includes one variable region (V_{L}) and one constant region (CL). The variable regions determine the specificity of the antibody. Each variable region comprises three hypervariable regions also known as complementarity determining regions (CDRs) flanked by four relatively conserved framework regions (FRs). The three CDRs, referred to as CDR1, CDR2, and CDR3, contribute to the antibody binding specificity. In some embodiments, the antibody is a chimeric antibody. In some embodiments, the antibody is a humanized antibody.

[0351] In some embodiments, the PD-1 targeting moiety is an antibody derivative or format. In some embodiments, the PD-1 targeting moiety comprises a single-domain antibody, a recombinant heavy-chain-only antibody (VHH), a single-chain antibody (scFv), a shark heavy-chain-only antibody (VNAR), a microprotein (cysteine knot protein, knottin), a DARPin; a Tetranectin; an Affibody; a Transbody; an Anticalin; an AdNectin; an Affilin; an Affimer, a Microbody; an aptamer; an alterase; a plastic antibody; a phylomer; a stradobody; a maxibody; an evibody; a fynomer, an armadillo repeat protein, a Kunitz domain, an avimer, an atrimer, a probody, an immunobody, a triomab, a troybody; a pepbody; a vaccibody, a UniBody; a DuoBody, a Fv, a Fab, a Fab′, a F(ab′)₂, a peptide mimetic molecule, or a synthetic molecule, as described in US Patent Nos. or Patent Publication Nos. U.S. Pat. No. 7,417,130, US 2004/132094, U.S. Pat. No. 5,831,012, US 2004/023334, U.S. Pat. Nos. 7,250,297, 6,818,418, US 2004/209243, U.S. Pat. Nos. 7,838,629, 7,186,524, 6,004,746, 5,475,096, US 2004/146938, US 2004/157209, U.S. Pat. Nos. 6,994,982, 6,794,144, US 2010/239633, U.S. Pat. No. 7,803,907, US 2010/119446, and/or U.S. Pat. No. 7,166,697, the contents of which are hereby incorporated by reference in their entireties. See also, Storz MAbs. 2011 May-Jun; 3 (3): 310-317.

[0352] In some embodiments, the PD-1 targeting moiety comprises a single-domain antibody, such as a VHH. The VHH may be derived from, for example, an organism that produces VHH antibody such as a camelid, a shark, or the VHH may be a designed VHH. VHHs are antibody-derived therapeutic proteins that contain the unique structural and functional properties of naturally-occurring heavy-chain antibodies. VHH technology is based on fully functional antibodies from camelids that lack light chains. These heavy-chain antibodies contain a single variable domain (VHH) and two constant domains (CH2 and CH3).

[0353] In an embodiment, the PD-1 targeting moiety comprises a VHH. In some embodiments, the VHH is a humanized VHH or camelized VHH.

[0354] In some embodiments, the VHH comprises a fully human V_{H} domain, e.g. a HUMABODY (Crescendo Biologics, Cambridge, UK). In some embodiments, fully human V_{H} domain, e.g. a HUMABODY is monovalent, bivalent, or trivalent. In some embodiments, the fully human V_{H} domain, e.g. a HUMABODY is mono- or multi-specific such as monospecific, bispecific, or trispecific. Illustrative fully human V_{H} domains, e.g. a HUMABODIES are described in, for example, WO2016/113555 and WO2016/113557, the entire disclosure of which is incorporated by reference.

[0355] In some embodiments, the PD-1 targeting moiety comprises a VHH comprising a single amino acid chain having four “framework regions” or FRs and three “complementary determining regions” or CDRs. As used herein, “framework region” or “FR” refers to a region in the variable domain which is located between the CDRs. As used herein, “complementary determining region” or “CDR” refers to variable regions in VHHs that contains the amino acid sequences capable of specifically binding to antigenic targets.

[0356] In various embodiments, the PD-1 targeting moiety comprises a VHH having a variable domain comprising at least one CDR1, CDR2, and/or CDR3 sequences. In various embodiments, the PD-1 targeting moiety comprises a VHH having a variable region comprising at least one FR1, FR2, FR3, and FR4 sequences.

[0357] In some embodiments, the CDR1 sequence of the PD-1 targeting moiety is selected from:

(SEQ ID NO: 333)
GFSMDYYAIA;
(SEQ ID NO: 334)
GFSMDYYAIA;
(SEQ ID NO: 335)
GFSVDYYAIA;
(SEQ ID NO: 336)
GFSMDYYAIA;
(SEQ ID NO: 337)
GGFNRVSYMG;
(SEQ ID NO: 338)
GGFNRVSYMG;
(SEQ ID NO: 339)
GIIKSINFMG;
(SEQ ID NO: 340)
GFILDYYGIG;
(SEQ ID NO: 341)
GLSLDYDGVG;
(SEQ ID NO: 342)
GFILDYYGIG;
(SEQ ID NO: 343)
GRTFSSLGMG;
(SEQ ID NO: 344)
GRTFSSLGMG;
(SEQ ID NO: 345)
GFAFGSYDMG;
(SEQ ID NO: 346)
GFSFGNNDMS;
(SEQ ID NO: 347)
IHAMG;
(SEQ ID NO: 348)
INAMA;
(SEQ ID NO: 349)
SGTMG;
(SEQ ID NO: 350)
GSIASIHAM;
(SEQ ID NO: 351)
GSIASIHAMG;
(SEQ ID NO: 352)
FYGMG;
(SEQ ID NO: 353)
GGTFSFYGMG;
(SEQ ID NO: 354)
YYAIA;
(SEQ ID NO: 355)
VSYMG;
(SEQ ID NO: 356)
INFMG;
(SEQ ID NO: 357)
SLGMG;
(SEQ ID NO: 358)
SYDMG;
and
(SEQ ID NO: 359)
NNDMS.

[0358] In some embodiments, the CDR2 sequence of the PD-1 targeting moiety is selected from:

(SEQ ID NO: 360)
CITGSDFMVDT;
(SEQ ID NO: 361)
CITGSDFMVDT;
(SEQ ID NO: 362)
CITGSDFMVDT;
(SEQ ID NO: 363)
CITGSDFMVDT;
(SEQ ID NO: 364)
SVTSGGEI;
(SEQ ID NO: 365)
SVTSGGEI;
(SEQ ID NO: 366)
STTSDGRT;
(SEQ ID NO: 367)
CISSSDGST;
(SEQ ID NO: 368)
CISSSDGST;
(SEQ ID NO: 369)
CISSSDGST;
(SEQ ID NO: 370)
AIAWNGAST;
(SEQ ID NO: 371)
AIAWNGAST;
(SEQ ID NO: 372)
GINSGGRIT;
(SEQ ID NO: 373)
AINSGGGST;
(SEQ ID NO: 374)
AITWSGGITYYEDSVKG;
(SEQ ID NO: 375)
VITWSGGITYYADSVKG;
(SEQ ID NO: 376)
VITVSGGITYYADSVKG;
(SEQ ID NO: 377)
AITWSGGITYYADSLKG;
(SEQ ID NO: 378)
LISWSGGSTYYEDSVKG;
(SEQ ID NO: 379)
SIPWSGGRIYYADSVKG;
(SEQ ID NO: 380)
VITWSGGITY;
(SEQ ID NO: 381)
VITVSGGITY;
(SEQ ID NO: 382)
DIRTSAGRTYYADSVKG;
(SEQ ID NO: 383)
DIRTSAGRTY;
(SEQ ID NO: 384)
CITGSDFMVDTY;
(SEQ ID NO: 385)
CITGSDFMVDTYYVASVKG;
(SEQ ID NO: 386)
SVTSGGEIT;
(SEQ ID NO: 387)
SVTSGGEITIADSVKG;
(SEQ ID NO: 388)
SVTSGGEITVADSVKG;
(SEQ ID NO: 389)
STTSDGRTT;
(SEQ ID NO: 390)
STTSDGRTTVADSVKG;
(SEQ ID NO: 391)
CISSSDGSTY;
(SEQ ID NO: 392)
AIAWNGASTY;
(SEQ ID NO: 393)
AIAWNGASTYYTESVKG;
(SEQ ID NO: 394)
GINSGGRITD;
(SEQ ID NO: 395)
GINSGGRITDYADSVTG;
(SEQ ID NO: 396)
AINSGGGSTY;
and
(SEQ ID NO: 397)
AINSGGGSTYYADSVKG.

[0359] In some embodiments, the CDR3 sequence of the PD-1 targeting moiety is selected from:

(SEQ ID NO: 398)
AVRSTANTLCPSHYSVMDY;
(SEQ ID NO: 399)
AVRSTANTLCPSHYSVMDY;
(SEQ ID NO: 400)
AVRSTANTLCPSHYSIMDY;
(SEQ ID NO: 401)
AVRSTANTLCPSHYSVMDY;
(SEQ ID NO: 402)
NADIWVSDARMYNY;
(SEQ ID NO: 403)
NADIWVSDARMYNY;
(SEQ ID NO: 404)
NADIWLPSDRMYNY;
(SEQ ID NO: 405)
ATATLCDGGIWGY;
(SEQ ID NO: 406)
ATATLCDGGIWGY;
(SEQ ID NO: 407)
ATATLCDGGIWGY;
(SEQ ID NO: 408)
AASGLGSVVVTANEYDY;
(SEQ ID NO: 409)
AASGLGSVVVTANEYDY;
(SEQ ID NO: 410)
AQGDRSSWHYYGMDY;
(SEQ ID NO: 411)
ATKSDPMTNEYDL;
(SEQ ID NO: 412)
DRAESSWYDY;
(SEQ ID NO: 413)
DKHQSSWYDY;
(SEQ ID NO: 414)
DKHQSSFYDY;
(SEQ ID NO: 415)
DRAQSSWYDY;
(SEQ ID NO: 416)
DRVDSNWYDY;
(SEQ ID NO: 417)
KERSTGWDFAS;
and
(SEQ ID NO: 418)
EMSGISGWDY.

[0360] In various illustrative embodiments, PD-1 targeting moiety comprises an amino acid sequence selected from the following sequences:

2PD23
(SEQ ID NO: 419)
QVQLQESGGGLVQPGGSLRLSCAASGFSMDYYAIAWFRQAPGKEREEISC
ITGSDFMVDTYYVASVKGRFTISRDNAENTAYLQMNNLKPEDTGVYFCAV
RSTANTLCPSHYSVMDYWGKGTQVTVSSAAAYPYDVPDYGSHHHHHH;
or
2PD26
(SEQ ID NO: 420)
QVQLQESGGGLVQAGGSLRLSCAASGFSMDYYAIAWFRQAPGKEREEISC
ITGSDFMVDTYYVASVKGRFTISRDNAENTAYLQMNNLKPEDTGVYFCAV
RSTANTLCPSHYSVMDYWGKGTQVTVSSAAAYPYDVPDYGSHHHHHH;
or
2PD90
(SEQ ID NO: 421)
QVQLQESGGGLVQPGGSLRLSCSASGFSVDYYAIAWFRQAPGKEREEISC
ITGSDFMVDTYYVASVKGRFTISRDNAKNTAYLQMNSLKPEDTGVYFCAV
RSTANTLCPSHYSIMDYWGKGTQVTVSSAAAYPYDVPDYGSHHHHHH;
or
2PD-106
(SEQ ID NO: 422)
QVQLQESGGGLVQPGGSLRLSCSASGFSMDYYAIAWFRQAPGKEREEISC
ITGSDFMVDTYYVASVKGRFTISRDNAKNTAHLQMNSLKPEDTGVYFCAV
RSTANTLCPSHYSVMDYWGKGTQVTVSSAAAYPYDVPDYGSHHHHHH;
or
2PD-16
(SEQ ID NO: 423)
QVQLQESGGGLVQAGGSLRLSCAASGGFNRVSYMGWYRQAPGTKRELVAS
VTSGGEITIADSVKGRFTVSRDNSKNTLYLQMNGLKPEDGATYWCNADIW
VSDARMYNYWGQGTQVTVSSAAAYPYDVPDYGSHHHHHH;
or
2PD71
(SEQ ID NO: 424)
QVQLQESGGGLVQTGESLRLSCAASGGFNRVSYMGWYRQAPGSKRELVAS
VTSGGEITVADSVKGRFTVSRDNNKNTLYLQMNGLKPEDGATYWCNADIW
VSDARMYNYWGQGTQVTVSSAAAYPYDVPDYGSHHHHHH;
or
2PD-152
(SEQ ID NO: 425)
QVQLQESGGGLVQTGESLRLSCAASGIIKSINFMGWYRQPPGTKRELVAS
TTSDGRTTVADSVKGRFTISRDNAKNTIYLEMSSLKPEDTATYWCNADIW
LPSDRMYNYWGQGTQVTVSSAAAYPYDVPDYGSHHHHHH;
or
2PD-12
(SEQ ID NO: 426)
QVQLQESGGGLVQAGGSLRLSCAVSGFILDYYGIGWFRQAPGKEREAVSC
ISSSDGSTYYADSVKGRFTISRDNALNTLYLQMNSLKPEDTAVYHCATAT
LCDGGIWGYWGQGTQVTVSSAAAYPYDVPDYGSHHHHHH;
or
3PD55
(SEQ ID NO: 427)
QVQLQESGGGLAQAGGSLRLSCEGSGLSLDYDGVGWFRQAPGKEREAVSC
ISSSDGSTYYADSVKGRFTISRGNALNTLYLQMNSLKPEDTAVYYCATAT
LCDGGIWGYWGQGTQVTVSSAAAYPYDVPDYGSHHHHHH;
or
3PD82
(SEQ ID NO: 428)
QVQLQESGGGSVQPGGSLRLSCAVSGFILDYYGIGWFRQAPGKEREAVSC
ISSSDGSTYYADSVKGRFTISRDNALNTLYLQMNSLKPEDTAVYYCATAT
LCDGGIWGYWGQGTQVTVSSAAAYPYDVPDYGSHHHHHH;
or
2PD8
(SEQ ID NO: 429)
QVQLQESGGGSVQAGDSLRLSCTASGRTFSSLGMGWFRQAPGKEREFVSA
IAWNGASTYYTESVKGRFTISRDDAKNTVYLQMNSLKPTDTAVYFCAASG
LGSVVVTANEYDYWGQGTQVTVSSAAAYPYDVPDYGSHHHHHH;
or
2PD27
(SEQ ID NO: 430)
QVQLQESGGGSVQPGKSLRLSCAASGRTFSSLGMGWFRQAPGKEREFVSA
IAWNGASTYYTESVKGRFTISRDDAKNTVYLQMNSLKPTDTAVYFCAASG
LGSVVVTANEYDYWGQGTQVTVSSAAAYPYDVPDYGSHHHHHH;
or
2PD82
(SEQ ID NO: 431)
QVQLQESGGGLVQPGGSLRLSCTTSGFAFGSYDMGWVRQAPGKGPEWVSG
INSGGRITDYADSVTGRFTISRDNAKNTLYLQMNSLKPEDTAVYYCAQGD
RSSWHYYGMDYWGKGTQVTVSSAAAYPYDVPDYGSHHHHHH;
or
3PD36
(SEQ ID NO: 432)
QVQLQESGGGLVQPGGSLRLSCAASGFSFGNNDMSWVRQAPGKGPEWVSA
INSGGGSTYYADSVKGRFTISRDNAKNTLYLQMNSLKPEDTAVYYCATKS
DPMTNEYDLWGXGTQVTVSSAAAYPYDVPDYGSHHHHHH.

[0361] In various illustrative embodiments, PD-1 targeting moiety comprises an amino acid sequence selected from SEQ ID NO: 419 to SEQ ID NO: 432 without the terminal histidine tag sequence (i.e., HHHHHH; SEQ ID NO: 327).

[0362] In some embodiments, PD-1 targeting moiety comprises an amino acid sequence selected from SEQ ID Nos: 419 to SEQ ID NO: 432 (provided above) without the HA tag (i.e., YPYDVPDYGS; SEQ ID NO: 328).

[0363] In some embodiments, PD-1 targeting moiety comprises an amino acid sequence selected from SEQ ID Nos: 419 to SEQ ID NO: 432 (provided above) without the AAA linker.

[0364] In some embodiments, PD-1 targeting moiety comprises an amino acid sequence selected from SEQ ID Nos: 419 to SEQ ID NO: 432 (provided above) without the AAA linker, HA tag, and terminal histidine tag sequence (i.e., AAAYPYDVPDYGSHHHHHH; SEQ ID NO: 329).

[0365] In various embodiments, the PD-1 targeting moiety comprises an amino acid sequence described in U.S. Publication No. 2017/0137517, the entire contents of which are incorporated by reference. By way of example, in some embodiments, the PD-1 targeting moiety comprises one of the following sequences in U.S. Publication No. 2017/0137517:

(SEQ ID NO: 433)
EVQLVESGGGLVQAGGSLRLSCAASGSIASIHAMGWFRQAPGKEREFVAVITWSGGITYYADSVKGRFTISRDN
AKNTVYLQMNSLKPEDTAIYYCAGDKHQSSWYDYWGQGTLVTVSS;
(SEQ ID NO: 434)
EVQLVESGGGLVQAGGSLRLSCAASGSIASIHAMGWFRQAPGKEREFVAVITWSGGITYYADSVKGRFTISRDN
AKNTVYLQMNSLKPEDTATYYCAGDKHQSSWYDYWGQGTLVTVSS;
(SEQ ID NO: 435)
EVQLVESGGGLVQAGGSLRLSCAASGSIASIHAMGWFRQAPGKEREFVAVITWSGGITYYADSVKGRFTISRDN
AKNTVYLQMNSLKPEDTATYYCAGDKHQSSWYDYWGQGTLVKVSS;
(SEQ ID NO: 436)
EVQLVESGGGVVQAGGSLRLSCAASGGTFSFYGMGWFRQAPGKEQEFVADIRTSAGRTYYADSVKGRFTISRD
NAKNTVYLQMNSLKPEDTAVYYCAAEMSGISGWDYWGQGTQVQVSS;
(SEQ ID NO: 437)
EVQLVESGGGVVQAGGSLRLSCAASGGTFSFYGMGWFRQAPGKEQEFVADIRTSAGRTYYADSVKGRFTISRD
NAKNTVYLQMNSLKPEDTAVYYCAAEMSGISGWDYWGQGTLVTVKS;
(SEQ ID NO: 438)
EVQLVESGGGVVQAGGSLRLSCAASGGTFSFYGMGWFRQAPGKEQEFVADIRTSAGRTYYADSVKGRFTISRD
NAKNTVYLQMNSLKPEDTAVYYCAAEMSGISGWDYWGQGTLVTVQS;
(SEQ ID NO: 439)
EVQLVESGGGLVQAGGSLRLSCAASGSIASIHAMGWFRQAPGKEQEFVADIRTSAGRTYYADSVKGRFTISRDN
AKNTVYLQMNSLKPEDTALYYCAAEMSGISGWDYWGQGTLVKVSS;
(SEQ ID NO: 440)
EVQLVESGGGLVQAGGSLRLSCAASGGTFSFYGMGWFRQAPGKEQEFVADIRTSAGRTYYADSVKGRFTISRD
NAKNTVYLQMNSLKPEDTALYYCAAEMSGISGWDYWGQGTLVQVSS;
(SEQ ID NO: 441)
EVQLVESGGGLVQAGGSLRLSCAASGGTFSFYGMGWFRQAPGKEQEFVADIRTSAGRTYYADSVKGRFTISRD
NAKNTVYLQMNSLKPEDTALYYCAAEMSGISGWDYWGQGTLVTVKS;
(SEQ ID NO: 442)
EVQLVESGGGVVQAGGSLRLSCAASGGTFSFYGMGWFRQAPGKEQEFVADIRTSAGRTYYADSVKGRFTISRD
NAKNTVYLQMNSLKPEDTALYYCAAEMSGISGWDYWGQGTLVTVQS;
(SEQ ID NO: 443)
EVQLVESGGGVVQAGGSLRLSCAASGGTFSFYGMGWFRQAPGKEQEFVADIRTSAGRTYYADSVKGRFTISRD
NAKNTVYLQMNSLKPEDTALYYCAAEMSGISGWDYWGQGTLVTVSS;
(SEQ ID NO: 444)
EVQLVESGGGVVQAGGSLRLSCAASGGTFSFYGMGWFRQAPGKEQEFVADIRTSAGRTYYADSVKGRFTISRD
NAKNTVYLQMNSLKPEDTALYYCAAEMSGISGWDYWGQGTLVKVSS;
(SEQ ID NO: 445)
EVQLVESGGGVVQAGGSLRLSCAASGGTFSFYGMGWFRQAPGKEQEFVADIRTSAGRTYYADSVKGRFTISRD
NAKNTVYLQMNSLKPEDTALYYCAAEMSGISGWDYWGQGTLVQVSS;
(SEQ ID NO: 446)
EVQLVESGGGVVQAGGSLRLSCAASGGTFSFYGMGWFRQAPGKEQEFVADIRTSAGRTYYADSVKGRFTISRD
NAKNTVYLQMNSLKPEDTALYYCAAEMSGISGWDYWGQGTLVTVKS;
(SEQ ID NO: 447)
EVQLVESGGGVVQPGGSLRLSCAASGGTFSFYGMGWFRQAPGKEQEFVADIRTSAGRTYYADSVKGRFTISRD
NSKNTVYLQMNSLRPEDTALYYCAAEMSGISGWDYWGQGTLVTVQS;
(SEQ ID NO: 448)
EVQLVESGGGVVQPGGSLRLSCAASGGTFSFYGMGWFRQAPGKEREFVADIRTSAGRTYYADSVKGRFTISRD
NSKNTVYLQMNSLRPEDTALYYCAAEMSGISGWDYWGQGTLVTVSS;
(SEQ ID NO: 449)
DVQLVESGGGVVQPGGSLRLSCAASGGTFSFYGMGWFRQAPGKEQEFVADIRTSAGRTYYADSVKGRFTISRD
NSKNTVYLQMNSLRPEDTALYYCAAEMSGISGWDYWGQGTLVTVSS;
(SEQ ID NO: 450)
DVQLVESGGGVVQPGGSLRLSCAASGGTFSFYGMGWFRQAPGKEREFVADIRTSAGRTYYADSVKGRFTISRD
NSKNTVYLQMNSLRPEDTALYYCAAEMSGISGWDYWGQGTLVTSSA;
(SEQ ID NO: 451)
EVQLVESGGGLVQAGGSLRLSCAASGGTFSFYGMGWFRQAPGKEQEFVADIRTSAGRTYYADSVKGRFTISRD
NAKNTVYLQMNSLKPEDTATYYCAAEMSGISGWDYWGQGTLVKVSSA;
(SEQ ID NO: 452)
EVQLVESGGGVVQAGGSLRLSCAASGGTFSFYGMGWFRQAPGKEQEFVADIRTSAGRTYYADSVKGRFTISRD
NAKNTVYLQMNSLKPEDTAVYYCAAEMSGISGWDYWGQGTLVQVSSA;
(SEQ ID NO: 453)
EVQLVESGGGVVQAGGSLRLSCAASGGTFSFYGMGWFRQAPGKEQEFVADIRTSAGRTYYADSVKGRFTISRD
NAKNTVYLQMNSLKPEDTAVYYCAAEMSGISGWDYWGQGTLVTVKSA;
(SEQ ID NO:454)
EVQLVESGGGVVQAGGSLRLSCAASGGTFSFYGMGWFRQAPGKEQEFVADIRTSAGRTYYADSVKGRFTISRD
NAKNTVYLQMNSLKPEDTAVYYCAAEMSGISGWDYWGQGTLVTVQSA;
(SEQ ID NO: 455)
EVQLVESGGGVVQAGGSLRLSCAASGGTFSFYGMGWFRQAPGKEQEFVADIRTSAGRTYYADSVKGRFTISRD
NAKNTVYLQMNSLKPEDTAVYYCAAEMSGISGWDYWGQGTLVKVSSA;
(SEQ ID NO: 456)
EVQLVESGGGLVQAGGSLRLSCAASGGTFSFYGMGWFRQAPGKEQEFVADIRTSAGRTYYADSVKGRFTISRD
NAKNTVYLQMNSLKPEDTALYYCAAEMSGISGWDYWGQGTLVQVSSA;
(SEQ ID NO: 457)
EVQLVESGGGLVQAGGSLRLSCAASGGTFSFYGMGWFRQAPGKEQEFVADIRTSAGRTYYADSVKGRFTISRD
NAKNTVYLQMNSLKPEDTALYYCAAEMSGISGWDYWGQGTLVTVKSA;
(SEQ ID NO: 458)
EVQLVESGGGLVQAGGSLRLSCAASGGTFSFYGMGWFRQAPGKEQEFVADIRTSAGRTYYADSVKGRFTISRD
NAKNTVYLQMNSLKPEDTALYYCAAEMSGISGWDYWGQGTLVTVQSA;
(SEQ ID NO: 459)
EVQLVESGGGLVQAGGSLRLSCAASGGTFSFYGMGWFRQAPGKEQEFVADIRTSAGRTYYADSVKGRFTISRD
NAKNTVYLQMNSLKPEDTALYYCAAEMSGISGWDYWGQGTLVTVSSA;
(SEQ ID NO: 460)
EVQLVESGGGVVQAGGSLRLSCAASGGTFSFYGMGWFRQAPGKEQEFVADIRTSAGRTYYADSVKGRFTISRD
NAKNTVYLQMNSLKPEDTALYYCAAEMSGISGWDYWGQGTLVKVSSA;
(SEQ ID NO: 461)
EVQLVESGGGVVQAGGSLRLSCAASGGTFSFYGMGWFRQAPGKEQEFVADIRTSAGRTYYADSVKGRFTISRD
NAKNTVYLQMNSLKPEDTALYYCAAEMSGISGWDYWGQGTLVQVSSA;
(SEQ ID NO: 462)
EVQLVESGGGVVQAGGSLRLSCAASGGTFSFYGMGWFRQAPGKEQEFVADIRTSAGRTYYADSVKGRFTISRD
NAKNTVYLQMNSLKPEDTALYYCAAEMSGISGWDYWGQGTLVTVKSA;
(SEQ ID NO: 463)
EVQLVESGGGVVQAGGSLRLSCAASGGTFSFYGMGWFRQAPGKEQEFVADIRTSAGRTYYADSVKGRFTISRD
NAKNTVYLQMNSLKPEDTALYYCAAEMSGISGWDYWGQGTLVTVQSA;
(SEQ ID NO: 464)
EVQLVESGGGVVQAGGSLRLSCAASGGTFSFYGMGWFRQAPGKEQEFVADIRTSAGRTYYADSVKGRFTISRD
NAKNTVYLQMNSLKPEDTALYYCAAEMSGISGWDYWGQGTLVTVSSA;
(SEQ ID NO: 465)
EVQLVESGGGVVQPGGSLRLSCAASGGTFSFYGMGWFRQAPGKEQEFVADIRTSAGRTYYADSVKGRFTISRD
NSKNTVYLQMNSLRPEDTALYYCAAEMSGISGWDYWGQGTLVTVSSA;
(SEQ ID NO: 466)
DVQLVESGGGVVQPGGSLRLSCAASGSIASIHAMGWFRQAPGKEREFVAVITWSGGITYYADSVKGRFTISRDN
SKNTVYLQMNSLRPEDTALYYCAGDKHQSSWYDYWGQGTLVTVSS;
(SEQ ID NO: 467)
EVQLVESGGGLVQPGGSLRLSCAASGSIASIHAMGWERQAPGKEREEVAVITWSGGITYYADSVKGRFTISRDN
SKNTVYLQMNSLRPEDTAIYYCAGDKHQSSWYDYWGQGTLVTVSS;
(SEQ ID NO: 468)
EVQLVESGGGVVQPGGSLRLSCAASGSIASIHAMGWERQAPGKEREEVAVITWSGGITYYADSVKGRFTISRDN
SKNTVYLQMNSLRPEDTALYYCAGDKHQSSWYDYWGQGTLVTVSS;
(SEQ ID NO: 469)
DVQLVESGGGVVQPGGSLRLSCAASGSIASIHAMGWERQAPGKEREEVAVITWSGGITYYADSVKGRFTISRDN
SKNTVYLQMNSLRPEDTALYYCAGDKHQSSWYDYWGQGTLVTVSSGGGGSGGGGSGGGGSGGGGSGGGG
SGGGGSGGGGSEVQLVESGGGVVQPGNSLRLSCAASGFTFSSFGMSWVRQAPGKGLEWVSSISGSGSDTLY
ADSVKGRFTISRDNAKTTLYLQMNSLRPEDTALYYCTIGGSLSRSSQGTLVTVSSA;
(SEQ ID NO: 470)
DVQLVESGGGVVQPGGSLRLSCAASGSIASIHAMGWERQAPGKEREEVAVITWSGGITYYADSVKGRFTISRDN
SKNTVYLQMNSLRPEDTALYYCAGDKHQSSWYDYWGQGTLVTVSSGGGGSGGGGSGGGGSGGGGSGGGG
SGGGGSGGGGSEVQLVESGGGVVQPGGSLRLSCAASGSIASIHAMGWFRQAPGKEREFVAVITWSGGITYYAD
SVKGRFTISRDNSKNTVYLQMNSLRPEDTALYYCAGDKHQSSWYDYWGQGTLVTVSSGGGGSGGGGSGGGG
SGGGGSGGGGSGGGGSGGGGSEVQLVESGGGVVQPGNSLRLSCAASGFTFSSFGMSWVRQAPGKGLESWVS
SISGSGSDTLYADSVKGRFTISRDNAKTTLYLQMNSLRPEDTALYYCTIGGSLSRSSQGTLVTVSSA;
(SEQ ID NO: 471)
DVQLVESGGGVVQPGGSLRLSCAASGSIASIHAMGWERQAPGKEREEVAVITVSGGITYYADSVKGRFTISRDN
SKNTVYLQMNSLRPEDTALYYCAGDKHQSSFYDYWGQGTLVTVSS;
(SEQ ID NO: 472)
DVQLVESGGGVVQPGGSLRLSCAASGSIASIHAMGWFRQAPGKEREFVAVITVSGGITYYADSVKGRFTISRDQ
SKNTVYLQMNSLRPEDTALYYCAGDKHQSSFYDYWGQGTLVTVSS;
(SEQ ID NO: 473)
DVQLVESGGGVVQPGGSLRLSCAASGSIASIHAMGWFRQAPGKEREFVAVITVSGGITYYADSVKGRFTISRDPS
KNTVYLQMNSLRPEDTALYYCAGDKHQSSFYDYWGQGTLVTVSS;
(SEQ ID NO: 474)
DVQLVESGGGVVQPGGSLRLSCAASGSIASIHAMGWFRQAPGKEREFVAVITVSGGITYYADSVKGRFTISRDPS
KNTVYLQMNSLRPEDTALYYCAGDKHQSSFYDYWGQGTLVTVSS;
(SEQ ID NO: 475)
DVQLVESGGGVVQPGGSLRLSCAASGSIASIHAMGWFRQAPGKEREFVAVITVSGGITYYADSVKGRFTISRDQ
SKNTVYLQMNSLRPEDTALYYCAGDKHQSSFYDYWGQGTLVTVSS;
(SEQ ID NO: 476)
DVQLVESGGGVVQPGGSLRLSCAASGSIASIHAMGWFRQAPGKEREFVAVITVSGGITYYADSVKGRFTISRDSS
KNTVYLQMNSLRPEDTALYYCAGDKHQSSFYDYWGQGTLVTVSS;
(SEQ ID NO: 477)
EVQLVESGGGLVQPGGSLRLSCAASGSIASIHAMGWERQAPGKEREEVAVITWSGGITYYADSVKGRFTISRDN
SKNTVYLQMNSLRPEDTAIYYCAGDKHQSSWYDYWGQGTLVTVSSGGGGSGGGGSGGGGSGGGGSGGGGS
GGGGSGGGGSEVQLVESGGGLVQPGGSLRLSCAASGSIASIHAMGWERQAPGKEREEVAVITWSGGITYYADS
VKGRFTISRDNSKNTVYLQMNSLRPEDTAIYYCAGDKHQSSWYDYWGQGTLVTVSSGGGGSGGGGSGGGGS
GGGGSGGGGSGGGGSGGGGSEVQLVESGGGLVQPGNSLRLSCAASGFTFSSFGMSWVRQAPGKGLESWVSS
ISGSGSDTLYADSVKGRFTISRDNAKTTLYLQMNSLRPEDTAVYYCTIGGSLSRSSQGTLVTVSS;
and
(SEQ ID NO: 478)
MQIPQAPWPWWAVLQLGWRPGWFLDSPDRPWNPPTFSPALLVVTEGDNATFTCSFSNTSESFVLNWYRMSP
SNQTDKLAAFPEDRSQPGQDCRFRVTQLPNGRDFHMSVVRARRNDSGTYLCGAISLAPKAQIKESLRAELRVTE
RRAEVPTAHPSPSPRPAGQFQTLVVGVVGGLLGSLVLLVWVLAVICSRAARGTIGARRTGQPLKEDPSAVPVFV
DYGELDFQWREKTPEPPVPCVPEQTEYATIVFPSGMGTSSPARRGSADGPRSAQPLRPEDGHCSWPL.

[0366] In some embodiments, PD-1 targeting moiety comprises an amino acid sequence selected from SEQ ID NOs: 433-478 having one or more substitutions at positions 1, 11, 14, 52a, 73, 74, 83, 89, 100a, 110, and 112 (according to Kabat numbering). In some embodiments, the amino acid at position 1 is E or D. In some embodiments, the amino acid at position 11 is L or V. In some embodiments, the amino acid at position 14 is A or P. In some embodiments, the amino acid at position 52a is W or V. In some embodiments, the amino acid at position 73 is N, S, P, or Q. In some embodiments, the amino acid at position 74 is A or S. In some embodiments, the amino acid at position 83 is K or R. In some embodiments, the amino acid at position 89 is T, V, I, or L. In some embodiments, the amino acid at position 100a is W or F. In some embodiments, the amino acid at position 110 is T, K, or Q. In some embodiments, the amino acid at position 112 is S, K, or Q.

[0367] In various embodiments, PD-1 targeting moiety comprises an amino acid sequence described in PCT Publication No. WO 2017/087587, the entire contents of which are incorporated by reference. By way of example, in some embodiments, PD-1 targeting moiety comprises one of the following sequences in PCT Publication No. WO 2017/087587:

(SEQ ID NO: 479)
EVQLVESGGGLVQAGGSLRLSCAASGGTFSFYGMGWFRQAPGKEQEFVADIRTSAGRTYYADSVKGRFTISRD
NAKNTVYLQMNSLKPEDTAVYYCAAEMSGISGWDYWGQGTQVTVSS;
(SEQ ID NO: 480)
EVQLVESGGGLVQAGGSLRLSCAASGSIASIHAMGWFRQAPGKEREFVAVITWSGGITYYADSVKGRFTISRDN
AKNTVYLQMNSLKPEDTATYYCAGDKHQSSWYDYWGQGTLVTVSS;
(SEQ ID NO: 481)
VEVQLVESGGGVVQAGGSLRLSCAASGSIASIHAMGWFRQAPGKEREFVAVITWSGGITYYADSVKGRFTISRDN
AKNTVYLQMNSLKPEDTAIYYCAGDKHQSSWYDYWGQGTLVKVSS;
(SEQ ID NO: 482)
EVQLVESGGGVVQAGGSLRLSCAASGSIASIHAMGWFRQAPGKEREFVAVITWSGGITYYADSVKGRFTISRDN
AKNTVYLQMNSLKPEDTAIYYCAGDKHQSSWYDYWGQGTLVQVSS;
(SEQ ID NO: 483)
EVQLVESGGGVVQAGGSLRLSCAASGSIASIHAMGWFRQAPGKEREFVAVITWSGGITYYADSVKGRFTISRDN
AKNTVYLQMNSLKPEDTAIYYCAGDKHQSSWYDYWGQGTLVTVKS;
(SEQ ID NO: 484)
EVQLVESGGGVVQAGGSLRLSCAASGSIASIHAMGWFRQAPGKEREFVAVITWSGGITYYADSVKGRFTISRDN
AKNTVYLQMNSLKPEDTAIYYCAGDKHQSSWYDYWGQGTLVTVQS;
(SEQ ID NO: 485)
EVQLVESGGGLVQAGGSLRLSCAASGSIASIHAMGWFRQAPGKEREFVAVITWSGGITYYADSVKGRFTISRDN
AKNTVYLQMNSLKPEDTALYYCAGDKHQSSWYDYWGQGTLVKVSS;
(SEQ ID NO: 486)
EVQLVESGGGLVQAGGSLRLSCAASGSIASIHAMGWFRQAPGKEREFVAVITWSGGITYYADSVKGRFTISRDN
AKNTVYLQMNSLKPEDTALYYCAGDKHQSSWYDYWGQGTLVQVSS;
(SEQ ID NO: 487)
EVQLVESGGGLVQAGGSLRLSCAASGSIASIHAMGWFRQAPGKEREFVAVITWSGGITYYADSVKGRFTISRDN
AKNTVYLQMNSLKPEDTALYYCAGDKHQSSWYDYWGQGTLVTVKS;
(SEQ ID NO: 488)
EVQLVESGGGLVQAGGSLRLSCAASGSIASIHAMGWFRQAPGKEREFVAVITWSGGITYYADSVKGRFTISRDN
AKNTVYLQMNSLKPEDTALYYCAGDKHQSSWYDYWGQGTLVTVQS;
(SEQ ID NO: 489)
EVQLVESGGGVVQAGGSLRLSCAASGSIASIHAMGWFRQAPGKEREFVAVITWSGGITYYADSVKGRFTISRDN
AKNTVYLQMNSLKPEDTALYYCAGDKHQSSWYDYWGQGTLVTVSS;
(SEQ ID NO: 490)
EVQLVESGGGVVQAGGSLRLSCAASGSIASIHAMGWFRQAPGKEREFVAVITWSGGITYYADSVKGRFTISRDN
AKNTVYLQMNSLKPEDTALYYCAGDKHQSSWYDYWGQGTLVKVSS;
(SEQ ID NO: 491)
EVQLVESGGGVVQAGGSLRLSCAASGSIASIHAMGWFRQAPGKEREFVAVITWSGGITYYADSVKGRFTISRDN
AKNTVYLQMNSLKPEDTALYYCAGDKHQSSWYDYWGQGTLVQVSS;
(SEQ ID NO: 492)
EVQLVESGGGVVQAGGSLRLSCAASGSIASIHAMGWFRQAPGKEREFVAVITWSGGITYYADSVKGRFTISRDN
AKNTVYLQMNSLKPEDTALYYCAGDKHQSSWYDYWGQGTLVTVKS;
(SEQ ID NO: 493)
EVQLVESGGGVVQAGGSLRLSCAASGSIASIHAMGWFRQAPGKEREFVAVITWSGGITYYADSVKGRFTISRDN
AKNTVYLQMNSLKPEDTALYYCAGDKHQSSWYDYWGQGTLVTVQS;
(SEQ ID NO: 494)
EVQLVESGGGVVQPGGSLRLSCAASGSIASIHAMGWFRQAPGKEREFVAVITWSGGITYYADSVKGRFTISRDN
SKNTVYLQMNSLRPEDTALYYCAGDKHQSSWYDYWGQGTLVTVSS;
(SEQ ID NO: 495)
DVQLVESGGGVVQPGGSLRLSCAASGSIASIHAMGWFRQAPGKEREFVAVITWSGGITYYADSVKGRFTISRDN
SKNTVYLQMNSLRPEDTALYYCAGDKHQSSWYDYWGQGTLVTVSS;
(SEQ ID NO: 496)
EVQLVESGGGLVQAGGSLRLSCAASGSIASIHAMGWFRQAPGKEREFVAVITWSGGITYYADSVKGRFTISRDN
AKNTVYLQMNSLKPEDTATYYCAGDKHQSSWYDYWGQGTLVTVSSA;
(SEQ ID NO: 497)
EVQLVESGGGVVQAGGSLRLSCAASGSIASIHAMGWFRQAPGKEREFVAVITWSGGITYYADSVKGRFTISRDN
AKNTVYLQMNSLKPEDTAIYYCAGDKHQSSWYDYWGQGTLVKVSSA;
(SEQ ID NO: 498)
EVQLVESGGGVVQAGGSLRLSCAASGSIASIHAMGWFRQAPGKEREFVAVITWSGGITYYADSVKGRFTISRDN
AKNTVYLQMNSLKPEDTAIYYCAGDKHQSSWYDYWGQGTLVQVSSA;
(SEQ ID NO: 499)
EVQLVESGGGVVQAGGSLRLSCAASGSIASIHAMGWFRQAPGKEREFVAVITWSGGITYYADSVKGRFTISRDN
AKNTVYLQMNSLKPEDTAIYYCAGDKHQSSWYDYWGQGTLVTVKSA;
(SEQ ID NO: 500)
EVQLVESGGGVVQAGGSLRLSCAASGSIASIHAtvCWFRQAPGKEREFVAVITWSGGITYYADSVKGRFTISRDN
AKNTVYLQMNSLKPEDTAIYYCAGDKHQSSWYDYWGQGTLVTVQSA;
(SEQ ID NO: 501)
EVQLVESGGGLVQAGGSLRLSCAASGSIASIHAtvCWFRQAPGKEREFVAVITWSGGITYYADSVKGRFTISRDNA
KNTVYLQMNSLKPEDTALYYCAGDKHQSSWYDYWGQGTLVKVSSA;
(SEQ ID NO: 502)
EVQLVESGGGLVQAGGSLRLSCAASGSIASIHAMGWFRQAPGKEREFVAVITWSGGITYYADSVKGRFTISRDN
AKNTVYLQMNSLKPEDTALYYCAGDKHQSSWYDYWGQGTLVQVSSA;
(SEQ ID NO: 503)
EVQLVESGGGLVQAGGSLRLSCAASGSIASIHAMGWFRQAPGKEREFVAVITWSGGITYYADSVKGRFTISRDN
AKNTVYLQMNSLKPEDTALYYCAGDKHQSSWYDYWGQGTLVTVKSA;
(SEQ ID NO: 504)
EVQLVESGGGLVQAGGSLRLSCAASGSIASIHAMGWFRQAPGKEREFVAVITWSGGITYYADSVKGRFTISRDN
AKNTVYLQMNSLKPEDTALYYCAGDKHQSSWYDYWGQGTLVTVQSA;
(SEQ ID NO: 505)
EVQLVESGGGVVQAGGSLRLSCAASGSIASIHAMGWFRQAPGKEREFVAVITWSGGITYYADSVKGRFTISRDN
AKNTVYLQMNSLKPEDTALYYCAGDKHQSSWYDYWGQGTLVTVSSA;
(SEQ ID NO: 506)
EVQLVESGGGVVQAGGSLRLSCAASGSIASIHAMGWFRQAPGKEREFVAVITWSGGITYYADSVKGRFTISRDN
AKNTVYLQMNSLKPEDTALYYCAGDKHQSSWYDYWGQGTLVKVSSA;
(SEQ ID NO: 507)
EVQLVESGGGVVQAGGSLRLSCAASGSIASIHAMGWFRQAPGKEREFVAVITWSGGITYYADSVKGRFTISRDN
AKNTVYLQMNSLKPEDTALYYCAGDKHQSSWYDYWGQGTLVQVSSA;
(SEQ ID NO: 508)
EVQLVESGGGVVQAGGSLRLSCAASGSIASIHAMGWFRQAPGKEREFVAVITWSGGITYYADSVKGRFTISRDN
AKNTVYLQMNSLKPEDTALYYCAGDKHQSSWYDYWGQGTLVTVKSA;
(SEQ ID NO: 509)
EVQLVESGGGVVQAGGSLRLSCAASGSIASIHAMGWFRQAPGKEREFVAVITWSGGITYYADSVKGRFTISRDN
AKNTVYLQMNSLKPEDTALYYCAGDKHQSSWYDYWGQGTLVTVQSA;
(SEQ ID NO: 510)
EVQLVESGGGVVQPGGSLRLSCAASGSIASIHAMGWFRQAPGKEREFVAVITWSGGITYYADSVKGRFTISRDN
SKNTVYLQMNSLRPEDTALYYCAGDKHQSSWYDYWGQGTLVTVSSA;
(SEQ ID NO: 511)
DVQLVESGGGVVQPGGSLRLSCAASGSIASIHAMGWFRQAPGKEREFVAVITWSGGITYYADSVKGRFTISRDN
SKNTVYLQMNSLRPEDTALYYCAGDKHQSSWYDYWGQGTLVTVSSA;
(SEQ ID NO: 512)
DVQLVESGGGVVQPGGSLRLSCAASGSIASIHAMGWFRQAPGKEREFVAIITWSGGITYYADSVKGRFTISRDNS
KNTVYLQMNSLRPEDTALYYCAGDKHQSSWYDYWGQGTLVTVSS;
(SEQ ID NO: 513)
EVQLVESGGGLVQPGGSLRLSCAASGSIASIHAMGWFRQAPGKEREFVAVITWSGGITYYADSVKGRFTISRDN
SKNTVYLQMNSLRPEDTAIYYCAGDKHQSSWYDYWGQGTLVTVSS;
(SEQ ID NO: 514)
EVQLVESGGGVVQPGGSLRLSCAASGSIASIHAMGWFRQAPGKEREFVAVITWSGGITYYADSVKGRFTISRDN
SKNTVYLQMNSLRPEDTALYYCAGDKHQSSWYDYWGQGTLVTVSS;
(SEQ ID NO: 515)
DVQLVESGGGVVQPGGSLRLSCAASGSIASIHAMGWFRQAPGKEREFVAVITWSGGITYYADSVKGRFTISRDN
SKNTVYLQMNSLRPEDTALYYCAGDKHQSSWYDYWGQGTLVTVSSGGGGSGGGGSGGGGSGGGGSGGGG
SGGGGSGGGGSEVQLVESGGGVVQPGNSLRLSCAASGFTFSSFGMSWVRQAPGKGLEWVSSISGSGSDTLY
ADSVKGRFTISRDNAKTTLYLQMNSLRPEDTALYYCTIGGSLSRSSQGTLVTVSSA;
(SEQ ID NO: 516)
DVQLVESGGGVVQPGGSLRLSCAASGSIASIHAMGWFRQAPGKEREFVAVITWSGGITYYADSVKGRFTISRDN
SKNTVYLQMNSLRPEDTALYYCAGDKHQSSWYDYWGQGTLVTVSSGGGGSGGGGSGGGGSGGGGSGGGG
SGGGGSGGGGSEVQLVESGGGVVQPGGSLRLSCAASGSIASIHAMGWFRQAPGKEREFVAVITWSGGITYYAD
SVKGRFTISRDNSKNTVYLQMNSLRPEDTALYYCAGDKHQSSWYDYWGQGTLVTVSSGGGGSGGGGSGGGG
SGGGGSGGGGSGGGGSGGGGSEVQLVESGGGVVQPGNSLRLSCAASGFTFSSFGMSWVRQAPGKGLESWVS
SISGSGSDTLYADSVKGRFTISRDNAKTTLYLQMNSLRPEDTALYYCTIGGSLSRSSQGTLVTVSSA;
(SEQ ID NO: 517)
DVQLVESGGGVVQPGGSLRLSCAASGSIASIHAMGWFRQAPGKEREFVAVITVSGGITYYADSVKGRFTISRDNS
KNTVYLQMNSLRPEDTALYYCAGDKHQSSFYDYWGQGTLVTVSS;
(SEQ ID NO: 518)
DVQLVESGGGVVQPGGSLRLSCAASGSIASIHAMGWFRQAPGKEREFVAVITVSGGITYYADSVKGRFTISRDQ
SKNTVYLQMNSLRPEDTALYYCAGDKHQSSFYDYWGQGTLVTVSS;
and
(SEQ ID NO: 519)
DVQLVESGGGVVQPGGSLRLSCAASGSIASIHAMGWFRQAPGKEREFVAVITVSGGITYYADSVKGRFTISRDPS
KNTVYLQMNSLRPEDTALYYCAGDKHQSSFYDYWGQGTLVTVSS.

[0368] In some embodiments, PD-1 targeting moiety comprises an amino acid sequence selected from SEQ ID NOs: 479-519 having one or more substitutions at positions 1, 11, 14, 52a, 73, 74, 83, 89, 100a, 110, and 112 (according to Kabat numbering). In some embodiments, the amino acid at position 1 is E or D. In some embodiments, the amino acid at position 11 is L or V. In some embodiments, the amino acid at position 14 is A or P. In some embodiments, the amino acid at position 52a is W or V. In some embodiments, the amino acid at position 73 is N, S, P, or Q. In some embodiments, the amino acid at position 74 is A or S. In some embodiments, the amino acid at position 83 is K or R. In some embodiments, the amino acid at position 89 is T, V, I, or L. In some embodiments, the amino acid at position 100a is W or F. In some embodiments, the amino acid at position 110 is T, K, or Q. In some embodiments, the amino acid at position 112 is S, K, or Q.

[0369] In various embodiments, the present invention contemplates the use of any natural or synthetic analogs, mutants, variants, alleles, homologs and orthologs (herein collectively referred to as “analogs”) of the PD-1 targeting moiety as described herein. In various embodiments, the amino acid sequence of PD-1 targeting moiety further includes an amino acid analog, an amino acid derivative, or other non-classical amino acids.

[0370] In an embodiment, the PD-1 targeting moiety comprises the anti-PD-1 antibody pembrolizumab (aka MK-3475, KEYTRUDA), or fragments thereof. Pembrolizumab and other humanized anti-PD-1 antibodies are disclosed in Hamid, et al. (2013) New England Journal of Medicine 369 (2): 134-44, U.S. Pat. No. 8,354,509, and WO 2009/114335, the entire disclosures of which are hereby incorporated by reference. In illustrative embodiments, pembrolizumab or an antigen-binding fragment thereof for use in the methods provided herein comprises a heavy chain comprising the amino acid sequence of SEQ ID NO: 69; and/or a light chain comprising the amino acid sequence of SEQ ID NO: 70).

[0371] In an embodiment, the PD-1 targeting moiety comprises the anti-PD-1 antibody, nivolumab (aka BMS-936558, MDX-1106, ONO-4538, OPDIVO), or fragments thereof. Nivolumab (clone 5C4) and other human monoclonal antibodies that specifically bind to PD-1 are disclosed in U.S. Pat. No. 8,008,449 and WO 2006/121168, the entire disclosures of which are hereby incorporated by reference. In illustrative embodiments, nivolumab or an antigen-binding fragment thereof comprises a heavy chain comprising the amino acid sequence of SEQ ID NO: 71; and/or a light chain comprising the amino acid sequence of SEQ ID NO: 72.

[0372] In an embodiment, the PD-1 targeting moiety comprises the anti-PD-1 antibody pidilizumab (aka CT-011, hBAT or hBAT-1), or fragments thereof. Pidilizumab and other humanized anti-PD-1 monoclonal antibodies are disclosed in US 2008/0025980 and WO 2009/101611, the entire disclosures of which are hereby incorporated by reference. In illustrative embodiments, the anti-PD-1 antibody or an antigen-binding fragment thereof for use in the methods provided herein comprises a light chain variable regions comprising an amino acid sequence selected from SEQ ID NOS: 15-18 of US 2008/0025980 (SEQ ID No: 15 of US 2008/0025980 (SEQ ID NO:73); SEQ ID No: 16 of US 2008/0025980 (SEQ ID NO:74); SEQ ID No: 17 of US 2008/0025980 (SEQ ID NO:75); and SEQ ID No: 18 of US 2008/0025980 (SEQ ID NO:76); and/or a heavy chain comprising an amino acid sequence selected from SEQ ID NOS: 20-24 of US 2008/0025980 (SEQ ID No: 20 of US 2008/0025980 (SEQ ID NO:77); SEQ ID No: 21 of US 2008/0025980 (SEQ ID NO:78); SEQ ID No: 22 of US 2008/0025980 (SEQ ID NO:79); SEQ ID No: 23 of US 2008/0025980 (SEQ ID NO:80); and SEQ ID No: 24 of US 2008/0025980 (SEQ ID NO:81).

[0373] In an embodiment, the targeting moiety comprises a light chain comprising SEQ ID NO:18 of US 2008/0025980 (SEQ ID NO: 76) and a heavy chain comprising SEQ ID NO:22 of US 2008/0025980 (SEQ ID NO:79).

[0374] In an embodiment, the targeting moiety comprises AMP-514 (aka MEDI-0680).

[0375] In an embodiment, the targeting moiety comprises the PD-L2-Fc fusion protein AMP-224, which is disclosed in WO2010/027827 and WO 2011/066342, the entire disclosures of which are hereby incorporated by reference. In such an embodiment, the targeting moiety may include a targeting domain which comprises SEQ ID NO:4 of WO2010/027827 (SEQ ID NO:82) and/or the B7-DC fusion protein which comprises SEQ ID NO:83 of WO2010/027827 (SEQ ID NO:83).

[0376] In an embodiment, the targeting moiety comprises the peptide AUNP 12 or any of the other peptides disclosed in US 2011/0318373 or 8,907,053. For example, the targeting moiety may comprise AUNP 12 (i.e., Compound 8 or SEQ ID NO:49 of US 2011/0318373) which has the sequence of (SEQ ID NO:84)

[chemical structure]

[0377] In an embodiment, the PD-1 targeting moiety comprises the anti-PD-1 antibody 1E3, or fragments thereof, as disclosed in US 2014/0044738, the entire disclosures of which are hereby incorporated by reference. In illustrative embodiments, 1E3 or an antigen-binding fragment thereof for use in the methods provided herein comprises a heavy chain variable region comprising the amino acid sequence of SEQ ID NO:85; and/or a light chain variable region comprising the amino acid sequence of SEQ ID NO:86.

[0378] In an embodiment, the PD-1 targeting moiety comprises the anti-PD-1 antibody 1E8, or fragments thereof, as disclosed in US 2014/0044738, the entire disclosures of which are hereby incorporated by reference. In illustrative embodiments, 1E8 or an antigen-binding fragment thereof for use in the methods provided herein comprises a heavy chain variable region comprising the amino acid sequence of SEQ ID NO:87; and/or a light chain variable region comprising the amino acid sequence of SEQ ID NO:88.

[0379] In an embodiment, the PD-1 targeting moiety comprises the anti-PD-1 antibody 1H3, or fragments thereof, as disclosed in US 2014/0044738, the entire disclosures of which are hereby incorporated by reference. In illustrative embodiments, 1H3 or an antigen-binding fragment thereof for use in the methods provided herein comprises a heavy chain variable region comprising the amino acid sequence of SEQ ID NO:89; and/or light chain variable region comprising the amino acid sequence of SEQ ID NO:90.

[0380] In an embodiment, the PD-1 targeting moiety comprises a VHH directed against PD-1 as disclosed, for example, in U.S. Pat. No. 8,907,065 and WO 2008/071447, the entire disclosures of which are hereby incorporated by reference. In illustrative embodiments, the VHHs against PD-1 comprise SEQ ID NOS: 347-351 of U.S. Pat. No. 8,907,065 (SEQ ID No: 347 of U.S. Pat. No. 8,907,065 (SEQ ID NO:91); SEQ ID No: 348 of U.S. Pat. No. 8,907,065 (SEQ ID NO:92); SEQ ID No: 349 of U.S. Pat. No. 8,907,065 (SEQ ID NO:93); SEQ ID No: 350 of U.S. Pat. No. 8,907,065 (SEQ ID NO:94); and SEQ ID No: 351 of U.S. Pat. No. 8,907,065 (SEQ ID NO:95).

[0381] In an embodiment, the PD-1 targeting moiety comprises any one of the anti-PD-1 antibodies, or fragments thereof, as disclosed in US2011/0271358 and WO2010/036959, the entire contents of which are hereby incorporated by reference. In illustrative embodiments, the antibody or an antigen-binding fragment thereof for use in the methods provided herein comprises a heavy chain comprising an amino acid sequence selected from SEQ ID NOS: 25-29 of US2011/0271358: (SEQ ID No: 25 of US2011/0271358 (SEQ ID NO:96); SEQ ID No: 26 of US2011/0271358 (SEQ ID NO:97); SEQ ID No: 27 of US2011/0271358 (SEQ ID NO:98); SEQ ID No: 28 of US2011/0271358 (SEQ ID NO: 99); and SEQ ID No: 29 of US2011/0271358 (SEQ ID NO:100)); and/or a light chain comprising an amino acid sequence selected from SEQ ID NOS: 30-33 of US2011/0271358 (SEQ ID No: 30 of US2011/0271358 (SEQ ID NO: 101); SEQ ID No: 31 of US2011/0271358 (SEQ ID NO:102); SEQ ID No: 32 of US2011/0271358 (SEQ ID NO: 103); and SEQ ID No: 33 of US2011/0271358 (SEQ ID NO:104).

[0382] In various embodiments, the PD-1 targeting moiety comprises one or more antibodies directed against PD-1, or antibody fragments thereof, selected from TSR-042 (Tesaro, Inc.), REGN2810 (Regeneron Pharmaceuticals, Inc.), PDR001 (Novartis Pharmaceuticals), and BGB-A317 (BeiGene Ltd.)

[0383] In various embodiments, the present multi-specific chimeric protein or chimeric protein complex has one or more targeting moieties directed against PD-L1. In some embodiments, the chimeric protein or chimeric protein complex has one or more PD-L1 targeting moieties, which selectively bind a PD-L1 polypeptide. In some embodiments, the chimeric protein or chimeric protein complex comprises one or more antibodies, antibody derivatives or formats, peptides or polypeptides, or fusion proteins that selectively bind a PD-L1 polypeptide.

[0384] Programmed death-ligand 1 (PD-L1) also known as cluster of differentiation 274 (CD274) or B7 homolog 1 (B7-H1) is a type 1 transmembrane protein that has been speculated to play a major role in suppressing the immune system. PD-L1 is upregulated on macrophages and dendritic cells (DC) in response to LPS and GM-CSF treatment, and on T cells and B cells upon TCR and B cell receptor signaling.

[0385] In various embodiments, the PD-L1 targeting moietiy comprises an antigen recognition domain that recognizes an epitope present on PD-L1. In an embodiment, the antigen-recognition domain recognizes one or more linear epitopes present on PD-L1. As used herein, a linear epitope refers to any continuous sequence of amino acids present on PD-L1. In another embodiment, the antigen-recognition domain recognizes one or more conformational epitopes present on PD-L1. As used herein, a conformation epitope refers to one or more sections of amino acids (which may be discontinuous) which form a three-dimensional surface with features and/or shapes and/or tertiary structures capable of being recognized by an antigen recognition domain.

[0386] In various embodiments, the PD-L1 targeting moietiy binds to the full-length and/or mature forms and/or isoforms and/or splice variants and/or fragments and/or any other naturally occurring or synthetic analogs, variants, or mutants of human PD-L1. In various embodiments, the PD-L1 targeting moietiy binds to any forms of the human PD-L1. In an embodiment, the PD-L1 targeting moietiy binds to a phosphorylated form of PD-L1. In an embodiment, the PD-L1 targeting moietiy binds to an acetylated form of PD-L1.

[0387] In an embodiment, the PD-L1 targeting moietiy comprises an antigen recognition domain that recognizes one or more epitopes present on human PD-L1. In an embodiment, the human PD-L1 comprises the amino acid sequence of (signal peptide underlined):

Isoform 1:
(SEQ ID NO: 520)
MRIFAVFIFMTYWHLLNAFTVTVPKDLYWEYGSNMTIECKFPVEKQLDLA
ALIVYWEMEDKNIIQFVHGEEDLKVQHSSYRQRARLLKDQLSLGNAALQI
TDVKLQDAGVYRCMISYGGADYKRITVKVNAPYNKINQRILVVDPVTSEH
ELTCQAEGYPKAEVIWTSSDHQVLSGKTTTTNSKREEKLFNVTSTLRINT
TTNEIFYCTFRRLDPEENHTAELVIPELPLAHPPNERTHLVILGAILLCL
GVALTFIFRLRKGRMMDVKKCGIQDTNSKKQSDTHLEET;
Isoform 2:
(SEQ ID NO: 521)
MRIFAVFIFMTYWHLLNAPYNKINQRILVVDPVTSEHELTCQAEGYPKAE
VIWTSSDHQVLSGKTTTTNSKREEKLFNVTSTLRINTTTNEIFYCTFRRL
DPEENHTAELVIPELPLAHPPNERTHLVILGAILLCLGVALTFIFRLRKG
RMMDVKKCGIQDTNSKKQSDTHLEET;
or
Isoform 3:
(SEQ ID NO: 522)
MRIFAVFIFMTYWHLLNAFTVTVPKDLYVVEYGSNMTIECKFPVEKQLDL
AALIVYWEMEDKNIIQFVHGEEDLKVQHSSYRQRARLLKDQLSLGNAALQ
ITDVKLQDAGVYRCMISYGGADYKRITVKVNAPYNKINQRILVVDPVTSE
HELTCQAEGYPKAEVIWTSSDHQVLSGD.

[0388] In various embodiments, the PD-L1 targeting moietiy is capable of specific binding. In various embodiments, the PD-L1 targeting moietiy comprises an antigen recognition domain such as an antibody or derivatives thereof. In an embodiment, the PD-L1 targeting moietiy comprises an antibody. In various embodiments, the antibody is a full-length multimeric protein that includes two heavy chains and two light chains. Each heavy chain includes one variable region (e.g., V_{H}) and at least three constant regions (e.g., CH₁, CH₂ and CH₃), and each light chain includes one variable region (V_{L}) and one constant region (C_{L}). The variable regions determine the specificity of the antibody. Each variable region comprises three hypervariable regions also known as complementarity determining regions (CDRs) flanked by four relatively conserved framework regions (FRs). The three CDRs, referred to as CDR1, CDR2, and CDR3, contribute to the antibody binding specificity. In some embodiments, the antibody is a chimeric antibody. In some embodiments, the antibody is a humanized antibody.

[0389] In some embodiments, the PD-L1 targeting moietiy comprises an antibody derivative or format. In some embodiments, the PD-L1 targeting moietiy comprises a single-domain antibody, a recombinant heavy-chain-only antibody (VHH), a single-chain antibody (scFv), a shark heavy-chain-only antibody (VNAR), a microprotein (cysteine knot protein, knottin), a DARPin; a Tetranectin; an Affibody; a Transbody; an Anticalin; an AdNectin; an Affilin; an Affimer, a Microbody; an aptamer; an alterase; a plastic antibody; a phylomer; a stradobody; a maxibody; an evibody; a fynomer, an armadillo repeat protein, a Kunitz domain, an avimer, an atrimer, a probody, an immunobody, a triomab, a troybody; a pepbody; a vaccibody, a UniBody; a DuoBody, a Fv, a Fab, a Fab′, a F(ab′)₂, a peptide mimetic molecule, or a synthetic molecule, as described in US Patent Nos. or Patent Publication Nos. U.S. Pat. No. 7,417,130, US 2004/132094, U.S. Pat. No. 5,831,012, US 2004/023334, U.S. Pat. Nos. 7,250,297, 6,818,418, US 2004/209243, U.S. Pat. Nos. 7,838,629, 7,186,524, 6,004,746, 5,475,096, US 2004/146938, US 2004/157209, U.S. Pat. Nos. 6,994,982, 6,794,144, US 2010/239633, U.S. Pat. No. 7,803,907, US 2010/119446, and/or U.S. Pat. No. 7,166,697, the contents of which are hereby incorporated by reference in their entireties. See also, Storz MAbs. 2011 May-Jun; 3 (3): 310-317.

[0390] In some embodiments, the PD-L1 targeting moietiy comprises a single-domain antibody, such as a VHH. The VHH may be derived from, for example, an organism that produces VHH antibody such as a camelid, a shark, or the VHH may be a designed VHH. VHHs are antibody-derived therapeutic proteins that contain the unique structural and functional properties of naturally-occurring heavy-chain antibodies. VHH technology is based on fully functional antibodies from camelids that lack light chains. These heavy-chain antibodies contain a single variable domain (VHH) and two constant domains (CH2 and CH3).

[0391] In an embodiment, the PD-L1 targeting moietiy comprises a VHH. In some embodiments, the VHH is a humanized VHH or camelized VHH.

[0392] In some embodiments, the VHH comprises a fully human V_{H} domain, e.g. a HUMABODY (Crescendo Biologics, Cambridge, UK). In some embodiments, fully human V_{H} domain, e.g. a HUMABODY is monovalent, bivalent, or trivalent. In some embodiments, the fully human V_{H} domain, e.g. a HUMABODY is mono- or multi-specific such as monospecific, bispecific, or trispecific. Illustrative fully human V_{H} domains, e.g. a HUMABODIES are described in, for example, WO2016/113555 and WO2016/113557, the entire disclosure of which is incorporated by reference.

[0393] In some embodiments, the PD-L1 targeting moietiy comprises a VHH comprising a single amino acid chain having four “framework regions” or FRs and three “complementary determining regions” or CDRs. As used herein, “framework region” or “FR” refers to a region in the variable domain which is located between the CDRs. As used herein, “complementary determining region” or “CDR” refers to variable regions in VHHs that contains the amino acid sequences capable of specifically binding to antigenic targets.

[0394] In various embodiments, the PD-L1 targeting moiety comprises a VHH having a variable domain comprising at least one CDR1, CDR2, and/or CDR3 sequences. In various embodiments, the PD-L1 targeting moiety comprises a VHH having a variable region comprising at least one FR1, FR2, FR3, and FR4 sequences.

[0395] In some embodiments, the CDR1 sequence of the PD-L1 targeting moiety is selected from:

(SEQ ID NO: 523)
GFTLDYYAIG;
(SEQ ID NO: 524)
GTIFSINHMD;
(SEQ ID NO: 525)
GFTFDDYGMS;
(SEQ ID NO: 526)
GFTLDYYAIN;
(SEQ ID NO: 527)
GTIFSINRMD;
(SEQ ID NO: 528)
GFTFSSYGMS;
(SEQ ID NO: 529)
GKIFSGNDMG;
(SEQ ID NO: 530)
GTIFSINRMD;
(SEQ ID NO: 531)
GFTFSSYGMS;
(SEQ ID NO: 532)
GFTFNDYAMS;
(SEQ ID NO: 533)
GFNLDPYAIA;
(SEQ ID NO: 534)
GFTFTAYAMS;
(SEQ ID NO: 535)
GFTFDYYAIG;
(SEQ ID NO: 536)
GFNLDPYAIA;
(SEQ ID NO: 537)
GTIFSINRMD;
(SEQ ID NO: 538)
GTIFSINRMD;
(SEQ ID NO: 539)
GFTFSSYGMS;
(SEQ ID NO: 540)
GFNLDPYAIG;
(SEQ ID NO: 541)
GFNLDPYAIA;
(SEQ ID NO: 542)
ESIFSIEAMG;
(SEQ ID NO: 543)
GKIFSGNDMG;
(SEQ ID NO: 544)
GFTLDYYAIG;
(SEQ ID NO: 545)
GFTFSSYGMS;
(SEQ ID NO: 546)
GTIFSINRMD;
(SEQ ID NO: 547)
GFTFSSYGMS;
(SEQ ID NO: 548)
GFNLDPYAIA;
(SEQ ID NO: 549)
GRTFSISAMG;
(SEQ ID NO: 550)
GFTLDYYAIN;
(SEQ ID NO: 551)
GFTFSSYGMS;
(SEQ ID NO: 552)
GFTFNDYAMS;
(SEQ ID NO: 553)
GFTLDYYAIG;
(SEQ ID NO: 554)
YYAIG;
(SEQ ID NO: 555)
YYAKC;
(SEQ ID NO: 556)
QYDVG;
(SEQ ID NO: 557)
NSAMG;
(SEQ ID NO: 558)
DSIVS;
(SEQ ID NO: 559)
INHMD;
(SEQ ID NO: 560)
DYGMS;
(SEQ ID NO: 561)
YYAIN;
(SEQ ID NO: 562)
INRMD;
(SEQ ID NO: 563)
SYGMS;
(SEQ ID NO: 564)
GNDMG;
(SEQ ID NO: 565)
DYAMS;
(SEQ ID NO: 566)
PYAIA;
(SEQ ID NO: 567)
AYAMS;
(SEQ ID NO: 568)
PYAIG;
(SEQ ID NO: 569)
IEAMG;
and
(SEQ ID NO: 570)
ISAMG.

[0396] In some embodiments, the CDR2 sequence of the PD-L1 targeting moietiy is selected from:

(SEQ ID NO: 571)
ISSSDGSTY;
(SEQ ID NO: 572)
ITSDGFPT;
(SEQ ID NO: 573)
IRWNGGSTN;
(SEQ ID NO: 574)
ISSSDGSTY;
(SEQ ID NO: 575)
ITSDGTPT;
(SEQ ID NO: 576)
IDSGGGSTS;
(SEQ ID NO: 577)
ITSGGITD;
(SEQ ID NO: 578)
ITSDGTPT;
(SEQ ID NO: 579)
IDSGGGSTS;
(SEQ ID NO: 580)
IRSNGGYTN;
(SEQ ID NO: 581)
ISSSDVGTY;
(SEQ ID NO: 582)
INSSDGSTY;
(SEQ ID NO: 583)
ISGSDSSTY;
(SEQ ID NO: 584)
ISSSDVGTY;
(SEQ ID NO: 585)
ITSDGTPT;
(SEQ ID NO: 586)
ITSDGTPA;
(SEQ ID NO: 587)
IDSGGGSTS;
(SEQ ID NO: 588)
ISSGDGSKY;
(SEQ ID NO: 589)
ISSSDVGTY;
(SEQ ID NO: 590)
IFGGGFTN;
(SEQ ID NO: 591)
ITSGGITD;
(SEQ ID NO: 592)
ISSSDGSTY;
(SEQ ID NO: 593)
IDSGGGSTS;
(SEQ ID NO: 594)
ITSDGTPT;
(SEQ ID NO: 595)
IDSGGGSTS;
(SEQ ID NO: 596)
ISSSDVGTY;
(SEQ ID NO: 597)
ITWSGGSTS;
(SEQ ID NO: 598)
ISSSDGSTY;
(SEQ ID NO: 599)
IDSGGGSTS;
(SEQ ID NO: 600)
IRSNGGYTN;
(SEQ ID NO: 601)
ISSSDGSTY;
(SEQ ID NO: 602)
SISSSDGSTYYADSVKG;
(SEQ ID NO: 603)
CISSSDGSTYYADSVKG;
(SEQ ID NO: 604)
CISGGDNSTYYADSVKG;
(SEQ ID NO: 605)
FSSSGGRTIYPDSVKG;
(SEQ ID NO: 606)
RITGGGLIAYTDSVKG;
(SEQ ID NO: 607)
GISNGGTIKYAESVLG;
(SEQ ID NO: 608)
LITSDGFPT;
(SEQ ID NO: 609)
LITSDGFPTYADSAKG;
(SEQ ID NO: 610)
AIRWNGGSTN;
(SEQ ID NO: 611)
AIRWNGGSTNYADSVKG;
(SEQ ID NO: 612)
LITSDGTPT;
(SEQ ID NO: 613)
LITSDGTPTYADSAKG
(SEQ ID NO: 614)
AIDSGGGSTS;
(SEQ ID NO: 615)
AIDSGGGSTSYADSVKG;
(SEQ ID NO: 616)
IITSGGITD;
(SEQ ID NO: 617)
IITSGGITDYADAVKG;
(SEQ ID NO: 618)
GIRSNGGYTN;
(SEQ ID NO: 619)
GIRSNGGYTNYADSVKG;
(SEQ ID NO: 620)
CISSSDVGTY;
(SEQ ID NO: 621)
CISSSDVGTYYADSVKG;
(SEQ ID NO: 622)
CINSSDGSTY;
(SEQ ID NO: 623)
CINSSDGSTYYADSVKG;
(SEQ ID NO: 624)
CISGSDSSTY;
(SEQ ID NO: 625)
CISGSDSSTYYADSVKG;
(SEQ ID NO: 626)
LITSDGTPA;
(SEQ ID NO: 627)
LITSDGTPAYADSAKG
(SEQ ID NO: 628)
CISSGDGSKY;
(SEQ ID NO: 629)
CISSGDGSKYYADSVKG;
(SEQ ID NO: 630)
AIFGGGFTN;
(SEQ ID NO: 631)
AIFGGGFTNYADSVKG
(SEQ ID NO: 632)
AITWSGGSTS;
and
(SEQ ID NO: 633)
AITWSGGSTSYTDSVKG.

[0397] In some embodiments, the CDR3 sequence of the PD-L1 targeting moietiy is selected from:

(SEQ ID NO: 634)
DGWSSCRHGIN-EYLYW;
(SEQ ID NO: 635)
SSGVYNYW;
(SEQ ID NO: 636)
QGYY-CSGYGCPR;
(SEQ ID NO: 637)
SGWRLCRPTDEYDYSYW;
(SEQ ID NO: 638)
SSGVYNYW;
(SEQ ID NO: 639)
QGYYCSGYGCSDYW;
(SEQ ID NO: 640)
RDRTIWW;
(SEQ ID NO: 641)
SSGVYNYW;
(SEQ ID NO: 642)
QGYY-CSGYGCSDYW
(SEQ ID NO: 643)
QGYYCSGYGCYP;
(SEQ ID NO: 644)
DGYYYCSDYPHPLYW
(SEQ ID NO: 645)
DGWRDCTWSNEYAYW;
(SEQ ID NO: 646)
TGWRTCRGLNEYDYW;
(SEQ ID NO: 647)
DGYYYCSDYPHPLYW
(SEQ ID NO: 648)
SSGVYNYW;
(SEQ ID NO: 649)
SSGVYNYW;
(SEQ ID NO: 650)
QGYYCSGYGCSDYW;
(SEQ ID NO: 651)
DGYYYCSDYPHPLYW
(SEQ ID NO: 652)
DGYYYCSDYPHPLYW
(SEQ ID NO: 653)
DLVSGSSRLYDYW;
(SEQ ID NO: 654)
RDRTIWW;
(SEQ ID NO: 655)
DGWSSCRHGINEYLYW;
(SEQ ID NO: 656)
QGYYCSGYGCSDYW;
(SEQ ID NO: 657)
SSGVYNYW;
(SEQ ID NO: 658)
QGYYCSGYGCSDYW;
(SEQ ID NO: 659)
DGYYYCSDYPHPLYW
(SEQ ID NO: 660)
MGRTNYGVIYDPNMYNYW;
(SEQ ID NO: 661)
SGWRLCRPTDEYDYLYW;
(SEQ ID NO: 662)
QGYYCSGYGCSDYW;
(SEQ ID NO: 663)
QGYYCSGYGCYP;
(SEQ ID NO: 664)
DGWSSCRHGINEYLYW;
(SEQ ID NO: 665)
SQAPITIATMMKPFYDY;
(SEQ ID NO: 666)
RHGGPLTVEYFFDY;
(SEQ ID NO: 667)
GGWKYCSGYDPEYIY
(SEQ ID NO: 668)
DINYLNSY;
(SEQ ID NO: 669)
INSRDG;
and
RQY.

[0398] In various illustrative embodiments, the PD-L1 targeting moietiy comprises an amino acid sequence selected from the following sequences:

2LIG2
(SEQ ID NO: 670)
QVQLQESGGGLVQAGGSLRLSCAASGFTLDYYAIGWFRQAPGKEREEVSCISSSDGSTYYADSVKGRFTISRDN
AKNTVNLQMNSLKPEDTAVYYCATDGWSSCRHGIN-EYLYWGQGTQVTVSSAAAYPYDVPDYGSHHHHHH
2LIG3
(SEQ ID NO: 671)
QVQLQESGGGLVQAGGSLRLSCTASGTIFSINHMDWFRQAPGKQRELVALITSDGFPTYADSAKGRFTISRDNT
KKTVSLQMNSLKPEDTAVYYCHVSSGVYNYWGQGTQVTVSSAAAYPYDVPDYGSHHHHHH;
2LIG16
(SEQ ID NO: 672)
QVQLQESGGGLVQPGGSLRLSCAASGFTFDDYGMSWVRQAPGKGLESWVSAIRWNGGSTNYADSVKGRFTISR
DNAKNTLYLQMNSLKSEDTAVYYCA-QGYY-CSGYGCPRGQGTQVTVSSAAAYPYDVPDYGSHHHHHH;
2LIG22
(SEQ ID NO: 673)
QVQLQESGGGLVQPGGSLRLSCAASGFTLDYYAINWFRQAPGKEREEVSCISSSDGSTYYADSVKGRFTISRDN
AKNTVYLQMNSLKPEDTAVYYCATSGWRLCRPTDEYDYSYWGQGTQVTVSSAAAYPYDVPDYGSHHHHHH;
2LIG27
(SEQ ID NO: 674)
QVQLQESGGGVVQAGGSLRLSCTASGTIFSINRMDWFRQAPGKQRELVALITSDGTPTYADSAKGRFTISRDNT
KKTVSLQMNSLKPEDTAVYYCHVSSGVYNYWGQGTQVTVSSAAAYPYDVPDYGSHHHHHH;
2LIG29
(SEQ ID NO: 675)
QVQLQESGGGLVQTGGSLRLSCAASGFTFSSYGMSWVRQTPGKGPESWVSAIDSGGGSTSYADSVKGRFTISR
DNAKNTLYLQMNSLKPEDTAVYYCA-QGYY-CSGYGCSDYWGQGTQVTVSSAAAYPYDVPDYGSHHHHHH;
2LIG30
(SEQ ID NO: 676)
QVQLQESGGGLVQPGGSLRLSCAASGKIFSGNDMGWYRQAPGKQRELVGIITSGGITDYADAVKGRFTISRDNA
KNMMYLQMNSLKPEDTAVYYCNMRDRTIWWGQGTQVTVSSAAAYPYDVPDYGSHHHHHH;
2LIG34
(SEQ ID NO: 677)
QVQLQESGGGSVQAGGSLRLSCTASGTIFSINRMDWFRQAPGKQRELVALITSDGTPTYADSAKGRFTISRDNT
KKTVSLQMNSLKPEDTAVYYCHVSSGVYNYWGQGTQVTVSSAAAYPYDVPDYGSHHHHHH;
2LIG35
(SEQ ID NO: 678)
QVQLQESGGGLVQPGGSLRLSCAASGFTFSSYGMSWVRQTPGKGPESWVSAIDSGGGSTSYADSVKGRFTTSR
DNAKNTLYLQMNSLKPEDTAVYYCA-QGYY-CSGYGCSDYWGQGTQVTVSSAAAYPYDVPDYGSHHHHHH;
2LIG48
(SEQ ID NO: 679)
QVQLQESGGGLVQPGGSLRLSCAASGFTFNDYAMSWVRQAPGKGLESWVSGIRSNGGYTNYADSVKGRFTISR
DNAKNTLYLQMNSLKSEDTAVYYCA-QGYY-CSGYGCYPGQGTQVTVSSAAAYPYDVPDYGSHHHHHH;
2LIG65
(SEQ ID NO: 680)
QVQLQESGGGLVQAGGSLRLSCAASGFNLDPYAIAWFRQAPGKEREEVSCISSSDVGTYYADSVKGRFTISRDN
AKKTVYLQMNSLKPEDTAVYYCATDGYYYCSDYPHPLYWGQGTQVTVSSAAAYPYDVPDYGSHHHHHH;
2LIG85
(SEQ ID NO: 681)
QVQLQESGGGLVQPGGSLRLSCAASGFTFTAYAMSWFRQAPGKEREEVSCINSSDGSTYYADSVKGRFTISRD
NAKNTVYLQMNSLKPEDTAVYHCATDGWRDCTWSNEYAYWGQGTQVTVSSAAAYPYDVPDYGSHHHHHH;
2LIG86
(SEQ ID NO: 682)
QVQLQESGGGLVQPGGSLRLSCAASGFTFDYYAIGWFRQAPGKEREEVSCISGSDSSTYYADSVKGRFTIVRDN
AQNTVYLQMNSLKPEDTAIYYCAVTGWRTCRGLNEYDYWGQGTQVTVSSAAAYPYDVPDYGSHHHHHH;
2LIG89
(SEQ ID NO: 683)
QVQLQESGGGLVQPGGSLRLSCAASGFNLDPYAIAWFRQAPGKEREEVSCISSSDVGTYYADSVKGRFTISRDN
TKKTVYLQMNSLKPEDTAVYYCATDGYYYCSDYPHPLYWGQGTQVTVSSAAAYPYDVPDYGSHHHHHH;
2LIG97
(SEQ ID NO: 684)
QVQLQESGGGLVQAGESLRLSCTASGTIFSINRMDWFRQAPGKQRELVALITSDGTPTYADSAKGRFTISRDNTK
KTVSLQMNSLKPEDTAVYYCHVSSGVYNYWGQGTQVTVSSAAAYPYDVPDYGSHHHHHH;
2LIG99
(SEQ ID NO: 685)
QVQLQESGGGLVQAGGSLRLSCTASGTIFSINRMDWFRQAPGKQRELVALITSDGTPAYADSAKGRFTISRDNT
KKTVSLQMNSLKPEDTAVYYCHVSSGVYNYWGQGTQVTVSSAAAYPYDVPDYGSHHHHHH;
2LIG109
(SEQ ID NO: 686)
QVQLQESGGGLVQSGGSLRLSCKTSGFTFSSYGMSWVRQTPGKGPESWVSAIDSGGGSTSYADSVKGRFTISR
DNAKNTLYLQMNSLKPEDTAVYYCAQGYY-CSGYGCSDYWGQGTQVTVSSAAAYPYDVPDYGSHHHHHH;
2LIG127
(SEQ ID NO: 687)
QVQLQESGGGLVQPGGSLRLSCAASGFNLDPYAIGWFRQAPGKEREEVSCISSGDGSKYYADSVKGRFTMSRD
NAKKTVYLQMNSLKPEDTAVYYCATDGYYYCSDYPHPLYWGQGTQVTVSSAAAYPYDVPDYGSHHHHHH;
2LIG139
(SEQ ID NO: 688)
QVQLQESGGGLVQPGGSLRLSCAVSGFNLDPYAIAWFRQAPGKEREEVSCISSSDVGTYYADSVKGRFTISRDN
AKKTVYLQMNSLKPEDTAVYYCATDGYYYCSDYPHPLYWGQGTQVTVSSAAAYPYDVPDYGSHHHHHH;
2LIG176
(SEQ ID NO: 689)
QVQLQESGGGLVQAGGSLRLSCAASESIFSIEAMGWYRQAPGKQRELVAAIFGGGFTNYADSVKGRFTISRDNA
NRTVYLQMNSLKPEDTAVYYCNADLVSGSSRLYDYWGQGTQVTVSSAAAYPYDVPDYGSHHHHHH;
2LIG189
(SEQ ID NO: 690)
QVQLQESGGGLVQAGGSLRLSCAASGKIFSGNDMGWYRQAPGKQRELVGIITSGGITDYADAVKGRFTISRDNA
KNMMYLQMNSLKPEDTAVYYCNMRDRTIWWGQGTQVTVSSAAAYPYDVPDYGSHHHHHH;
3LIG3
(SEQ ID NO: 691)
QVQLQESGGGLVQPGGSLRLSCAASGFTLDYYAIGWFRQAPGKEREEVSCISSSDGSTYYADSVKGRFTISRDN
AKNTVNLQMNSLKPEDTAVYYCATDGWSSCRHGINEYLYWGQGTQVTVSSAAAYPYDVPDYGSHHHHHH;
3LIG7
(SEQ ID NO: 692)
QVQLQESGGGLVQAGGSLRLSCAASGFTFSSYGMSWVRQTPGKGPESWVSAIDSGGGSTSYADSVKGRFTISR
DNAKNTLYLQMNSLKPEDTAVYYCAQGYY-CSGYGCSDYWGQGTQVTVSSAAAYPYDVPDYGSHHHHHH;
3LIG8
(SEQ ID NO: 693)
QVQLQESGGGLVQPGGSLRLSCTASGTIFSINRMDWFRQAPGKQRELVALITSDGTPTYADSAKGRFTISRDNT
KKTVSLQMNSLKPEDTAVYYCHVSSGVYNYWGQGTQVTVSSAAAYPYDVPDYGSHHHHHH;
3LIG9
(SEQ ID NO: 694)
QVQLQESGGGLVQPGGSLRLSCAASGFTFSSYGMSWVRQTPGKGPESWVSAIDSGGGSTSYADSVKGRFTISR
DNAKNTLYLQMNSLKPEDTAVYYCAQGYYCSGYGCSDYWGQGTQVTVSSAAAYPYDVPDYGSHHHHHH;
3LIG18
(SEQ ID NO: 695)
QVQLQESGGGLVQPGGSLRLSCAASGFNLDPYAIAWFRQAPGKEREEVSCISSSDVGTYYADSVKGRFTISRDN
AKKTVYLQMNSLKPEDTAVYYCATDGYYYCSDYPHPLYWGQGTQVTVSSAAAYPYDVPDYGSHHHHHH;
3LIG20
(SEQ ID NO: 696)
QVQLQESGGGLVXAGGSLRLSCAASGRTFSISAMGWFRQAPGKEREFVAAITWSGGSTSYTDSVKGRFTISRD
NAKNTLYLQMNSLKPEDTAIYYCAAMGRTNYGVIYDPNMYNYWGQGTQVTVSSAAAYPYDVPDYGSHHHHHH;
3LIG28
(SEQ ID NO: 697)
QVQLQESGGGLVQPGGSLRLSCAASGFTLDYYAINWFRQAPGKEREEVSCISSSDGSTYYADSVKGRFTISRDN
AKNTVYLQMNSLKPEDTAVYYCATSGWRLCRPTDEYDYLYWGQGTQVTVSSAAAYPYDVPDYGSHHHHHH;
3LIG29
(SEQ ID NO: 698)
QVQLQESGGGLVQAGGSMRLSCAASGFTFSSYGMSWVRQTPGKGPESWVSAIDSGGGSTSYADSVKGRFTISR
DNAKNTLYLQMNSLKPEDTAVYYCAQGYYCSGYGCSDYWGQGTQVTVSSAAAYPYDVPDYGSHHHHHH;
3LIG30
(SEQ ID NO: 699)
QVQLQESGGGTVQAGGSLRLSCAASGFTFNDYAMSWVRQAPGKGLESWVSGIRSNGGYTNYADSVKGRFTISR
DNAKNTLYLQMNSLKSEDTAVYYCAQGYYCSGYGCYPGQGTQVTVSSAAAYPYDVPDYGSHHHHHH;
or
3LIG33
(SEQ ID NO: 700)
QVQLQESGGGLVQPGTSLRLSCAASGFTLDYYAIGWFRQAPGKEREEVSCISSSDGSTYYADSVKGRFTISRDN
AKNTVNLQMNSLKPEDTAVYYCATDGWSSCRHGINEYLYWGQGTQVTVSSAAAYPYDVPDYGSHHHHHH.

[0399] In various illustrative embodiments, the PD-L1 targeting moietiy comprises an amino acid sequence selected from any one of the above sequences without the terminal histidine tag sequence (i.e., HHHHHH; SEQ ID NO: 327).

[0400] In some embodiments, the PD-L1 targeting moietiy comprises an amino acid sequence selected from SEQ ID Nos: 670-700 (provided above) without the HA tag (i.e., YPYDVPDYGS; SEQ ID NO: 328).

[0401] In some embodiments, the PD-L1 targeting moietiy comprises an amino acid sequence selected from SEQ ID Nos: 670-700 (provided above) without the AAA linker.

[0402] In some embodiments, the PD-L1 targeting moietiy comprises an amino acid sequence selected from SEQ ID Nos: 670-700 (provided above) without the AAA linker, HA tag, and terminal histidine tag sequence (i.e., AAAYPYDVPDYGSHHHHHH; SEQ ID NO: 329).

[0403] In an embodiment, the PD-L1 targeting moiety comprises the anti-PD-L1 antibody MEDI4736 (aka durvalumab), or fragments thereof. MEDI4736 is selective for PD-L1 and blocks the binding of PD-L1 to the PD-1 and CD80 receptors. MEDI4736 and antigen-binding fragments thereof for use in the methods provided herein comprises a heavy chain and a light chain or a heavy chain variable region and a light chain variable region. The sequence of MEDI4736 is disclosed in WO/2016/06272, the entire contents of which are hereby incorporated by reference. In illustrative embodiments, MEDI4736 or an antigen-binding fragment thereof for use in the methods provided herein comprises a heavy chain comprising the amino acid sequence of SEQ ID NO: 105; and/or a light chain comprising the amino acid sequence of SEQ ID NO: 106.

[0404] In illustrative embodiments, the MEDI4736 or an antigen-binding fragment thereof for use in the methods provided herein comprises a heavy chain variable region comprising the amino acid sequence of SEQ ID NO:4 of WO/2016/06272 (SEQ ID NO:107); and/or a light chain variable region comprising the amino acid sequence of SEQ ID NO:3 of WO/2016/06272 (SEQ ID NO:108).

[0405] In an embodiment, the targeting moiety comprises the anti-PD-L1 antibody atezolizumab (aka MPDL3280A, RG7446), or fragments thereof. In illustrative embodiments, atezolizumab or an antigen-binding fragment thereof for use in the methods provided herein comprises a heavy chain comprising the amino acid sequence of SEQ ID NO: 109; and/or a light chain comprising the amino acid sequence of SEQ ID NO:110.

[0406] In an embodiment, the targeting moiety comprises the anti-PD-L1 antibody avelumab (aka MSB0010718C), or fragments thereof. In illustrative embodiments, avelumab or an antigen-binding fragment thereof for use in the methods provided herein comprises a heavy chain comprising the amino acid sequence of SEQ ID NO:111; and/or a light chain comprising the amino acid sequence of SEQ ID NO:112.

[0407] In an embodiment, the targeting moiety comprises the anti-PD-L1 antibody BMS-936559 (aka 12A4, MDX-1105), or fragments thereof, as disclosed in US 2013/0309250 and WO2007/005874, the entire disclosures of which are hereby incorporated by reference. In illustrative embodiments, BMS-936559 or an antigen-binding fragment thereof for use in the methods provided herein comprises a heavy chain variable region comprising the amino acid sequence of SEQ ID NO:113; and/or a light chain variable region comprising the amino acid sequence of SEQ ID NO: 114.

[0408] In an embodiment, the targeting moiety comprises the anti-PD-L1 antibody 3G10, or fragments thereof, as disclosed in US 2013/0309250 and WO2007/005874, the entire disclosures of which are hereby incorporated by reference. In illustrative embodiments, 3G10 or an antigen-binding fragment thereof for use in the methods provided herein comprises a heavy chain variable region comprising the amino acid sequence of SEQ ID NO:115; and/or a light chain variable region comprising the amino acid sequence of SEQ ID NO:116.

[0409] In an embodiment, the targeting moiety comprises the anti-PD-L1 antibody 10A5, or fragments thereof, as disclosed in US 2013/0309250 and WO2007/005874, the entire disclosures of which are hereby incorporated by reference. In illustrative embodiments, 10A5 or an antigen-binding fragment thereof for use in the methods provided herein comprises a heavy chain variable region comprising the amino acid sequence of SEQ ID NO:117; and/or a light chain variable region comprising the amino acid sequence of SEQ ID NO:118.

[0410] In an embodiment, the targeting moiety comprises the anti-PD-L1 antibody 5F8, or fragments thereof, as disclosed in US 2013/0309250 and WO2007/005874, the entire disclosures of which are hereby incorporated by reference. In illustrative embodiments, 5F8 or an antigen-binding fragment thereof for use in the methods provided herein comprises a heavy chain variable region comprising the amino acid sequence of SEQ ID NO:119; and/or a light chain variable region comprising the amino acid sequence of SEQ ID NO:120.

[0411] In an embodiment, the targeting moiety comprises the anti-PD-L1 antibody 10H10, or fragments thereof, as disclosed in US 2013/0309250 and WO2007/005874, the entire disclosures of which are hereby incorporated by reference. In illustrative embodiments, 10H10 or an antigen-binding fragment thereof for use in the methods provided herein comprises a heavy chain variable region comprising the amino acid sequence of SEQ ID NO: 121; and/or a light chain variable region comprising the amino acid sequence of SEQ ID NO: 122.

[0412] In an embodiment, the targeting moiety comprises the anti-PD-L1 antibody 1B12, or fragments thereof, as disclosed in US 2013/0309250 and WO2007/005874, the entire disclosures of which are hereby incorporated by reference. In illustrative embodiments, 1B12 or an antigen-binding fragment thereof for use in the methods provided herein comprises a heavy chain variable region comprising the amino acid sequence of SEQ ID NO: 123; and/or a light chain variable region comprising the amino acid sequence of SEQ ID NO:124.

[0413] In an embodiment, the targeting moiety comprises the anti-PD-L1 antibody 7H1, or fragments thereof, as disclosed in US 2013/0309250 and WO2007/005874, the entire disclosures of which are hereby incorporated by reference. In illustrative embodiments, 7H1 or an antigen-binding fragment thereof for use in the methods provided herein comprises a heavy chain variable region comprising the amino acid sequence of SEQ ID NO: 125; and/or a light chain variable region comprising the amino acid sequence of SEQ ID NO: 126.

[0414] In an embodiment, the targeting moiety comprises the anti-PD-L1 antibody 11E6, or fragments thereof, as disclosed in US 2013/0309250 and WO2007/005874, the entire disclosures of which are hereby incorporated by reference. In illustrative embodiments, 11E6 or an antigen-binding fragment thereof for use in the methods provided herein comprises a heavy chain variable region comprising the amino acid sequence of SEQ ID NO:127; and/or a light chain variable region comprising the amino acid sequence of SEQ ID NO:128.

[0415] In an embodiment, the targeting moiety comprises the anti-PD-L1 antibody 12B7, or fragments thereof, as disclosed in US 2013/0309250 and WO2007/005874, the entire disclosures of which are hereby incorporated by reference. In illustrative embodiments, 12B7 or an antigen-binding fragment thereof for use in the methods provided herein comprises a heavy chain variable region comprising the amino acid sequence of SEQ ID NO: 129; and/or a light chain variable region comprising the amino acid sequence of SEQ ID NO:130.

[0416] In an embodiment, the targeting moiety comprises the anti-PD-L1 antibody 13G4, or fragments thereof, as disclosed in US 2013/0309250 and WO2007/005874, the entire disclosures of which are hereby incorporated by reference. In illustrative embodiments, 13G4 or an antigen-binding fragment thereof for use in the methods provided herein comprises a heavy chain variable region comprising the amino acid sequence of SEQ ID NO: 131; and/or a light chain variable region comprising the amino acid sequence of SEQ ID NO:132.

[0417] In an embodiment, the targeting moiety comprises the anti-PD-L1 antibody 1E12, or fragments thereof, as disclosed in US 2014/0044738, the entire disclosures of which are hereby incorporated by reference. In illustrative embodiments, 1E12 or an antigen-binding fragment thereof for use in the methods provided herein comprises a heavy chain variable region comprising the amino acid sequence of SEQ ID NO: 133; and/or a light chain variable region comprising the amino acid sequence of SEQ ID NO: 134.

[0418] In an embodiment, the targeting moiety comprises the anti-PD-L1 antibody 1F4, or fragments thereof, as disclosed in US 2014/0044738, the entire disclosures of which are hereby incorporated by reference. In illustrative embodiments, 1F4 or an antigen-binding fragment thereof for use in the methods provided herein comprises a heavy chain variable region comprising the amino acid sequence of SEQ ID NO: 135; and/or a light chain variable region comprising the amino acid sequence of SEQ ID NO:136.

[0419] In an embodiment, the targeting moiety comprises the anti-PD-L1 antibody 2G11, or fragments thereof, as disclosed in US 2014/0044738, the entire disclosures of which are hereby incorporated by reference. In illustrative embodiments, 2G11 or an antigen-binding fragment thereof for use in the methods provided herein comprises a heavy chain variable region comprising the amino acid sequence of SEQ ID NO: 137; and/or a light chain variable region comprising the amino acid sequence of SEQ ID NO:138.

[0420] In an embodiment, the targeting moiety comprises the anti-PD-L1 antibody 3B6, or fragments thereof, as disclosed in US 2014/0044738, the entire disclosures of which are hereby incorporated by reference. In illustrative embodiments, 3B6 or an antigen-binding fragment thereof for use in the methods provided herein comprises a heavy chain variable region comprising the amino acid sequence of SEQ ID NO: 139; and/or a light chain variable region comprising the amino acid sequence of SEQ ID NO:140.

[0421] In an embodiment, the targeting moiety comprises the anti-PD-L1 antibody 3D10, or fragments thereof, as disclosed in US 2014/0044738 and WO2012/145493, the entire disclosures of which are hereby incorporated by reference. In illustrative embodiments, 3D10 or an antigen-binding fragment thereof for use in the methods provided herein comprises a heavy chain variable region comprising the amino acid sequence of (SEQ ID NO: 141; and/or a light chain variable region comprising the amino acid sequence of SEQ ID NO:142.

[0422] In an embodiment, the targeting moiety comprises any one of the anti-PD-L1 antibodies disclosed in US2011/0271358 and WO2010/036959, the entire contents of which are hereby incorporated by reference. In illustrative embodiments, the antibody or an antigen-binding fragment thereof for use in the methods provided herein comprises a heavy chain comprising an amino acid sequence selected from SEQ ID Nos: 34-38 of US2011/0271358 (SEQ ID No: 34 of US2011/0271358 (SEQ ID NO:143); SEQ ID No: 35 of US2011/0271358 (SEQ ID NO:144); SEQ ID No: 36 of US2011/0271358 (SEQ ID NO:145); SEQ ID No: 37 of US2011/0271358 (SEQ ID NO:146); and SEQ ID No: 38 of US2011/0271358 (SEQ ID NO:147)); and/or a light chain comprising an amino acid sequence selected from SEQ ID Nos: 39-42 of US2011/0271358 (SEQ ID No: 39 of US2011/0271358 (SEQ ID NO:148); SEQ ID No: 40 of US2011/0271358 (SEQ ID NO:149); SEQ ID No: 41 of US2011/0271358 (SEQ ID NO:150); and SEQ ID No: 42 of US2011/0271358 (SEQ ID NO:151)).

[0423] In an embodiment, the targeting moiety comprises the anti-PD-L1 antibody 2.7A4, or fragments thereof, as disclosed in WO 2011/066389, U.S. Pat. No. 8,779,108, and US2014/0356353, the entire disclosures of which are hereby incorporated by reference. In illustrative embodiments, 2.7A4 or an antigen-binding fragment thereof for use in the methods provided herein comprises a heavy chain variable region comprising the amino acid sequence of SEQ ID No: 2 of WO 2011/066389 (SEQ ID NO:152); and/or a light chain variable region comprising the amino acid sequence of SEQ ID No: 7 of WO 2011/066389 (SEQ ID NO:153).

[0424] In an embodiment, the targeting moiety comprises the anti-PD-L1 antibody 2.9D10, or fragments thereof, as disclosed in WO 2011/066389, U.S. Pat. No. 8,779,108, and US2014/0356353, the entire disclosures of which are hereby incorporated by reference. In illustrative embodiments, 2.9D10 or an antigen-binding fragment thereof for use in the methods provided herein comprises a heavy chain variable region comprising the amino acid sequence of SEQ ID No: 12 of WO 2011/066389 (SEQ ID NO:154); and/or a light chain variable region comprising the amino acid sequence of SEQ ID No: 17 of WO 2011/066389 (SEQ ID NO:155).

[0425] In an embodiment, the targeting moiety comprises the anti-PD-L1 antibody 2.14H9, or fragments thereof, as disclosed in WO 2011/066389, U.S. Pat. No. 8,779,108, and US2014/0356353, the entire disclosures of which are hereby incorporated by reference. In illustrative embodiments, 2.14H9 or an antigen-binding fragment thereof for use in the methods provided herein comprises a heavy chain variable region comprising the amino acid sequence of SEQ ID No: 22 of WO 2011/066389 (SEQ ID NO:156); and/or a light chain variable region comprising the amino acid sequence of SEQ ID No: 27 of WO 2011/066389 (SEQ ID NO:157).

[0426] In an embodiment, the targeting moiety comprises the anti-PD-L1 antibody 2.20A8, or fragments thereof, as disclosed in WO 2011/066389, U.S. Pat. No. 8,779,108, and US2014/0356353, the entire disclosures of which are hereby incorporated by reference. In illustrative embodiments, 2.20A8 or an antigen-binding fragment thereof for use in the methods provided herein comprises a heavy chain variable region comprising the amino acid sequence of SEQ ID No: 32 of WO 2011/066389 (SEQ ID NO:158); and/or a light chain variable region comprising the amino acid sequence of SEQ ID No: 37 of WO 2011/066389 (SEQ ID NO:159).

[0427] In an embodiment, the targeting moiety comprises the anti-PD-L1 antibody 3.15G8, or fragments thereof, as disclosed in WO 2011/066389, U.S. Pat. No. 8,779,108, and US2014/0356353, the entire disclosures of which are hereby incorporated by reference. In illustrative embodiments, 3.15G8 or an antigen-binding fragment thereof for use in the methods provided herein comprises a heavy chain variable region comprising the amino acid sequence of SEQ ID No: 42 of WO 2011/066389 (SEQ ID NO:160); and/or a light chain variable region comprising the amino acid sequence of SEQ ID No: 47 of WO 2011/066389 (SEQ ID NO:161).

[0428] In an embodiment, the targeting moiety comprises the anti-PD-L1 antibody 3.18G1, or fragments thereof, as disclosed in WO 2011/066389, U.S. Pat. No. 8,779,108, and US2014/0356353, the entire disclosures of which are hereby incorporated by reference. In illustrative embodiments, 3.18G1 or an antigen-binding fragment thereof for use in the methods provided herein comprises a heavy chain variable region comprising the amino acid sequence of SEQ ID No: 52 of WO 2011/066389 (SEQ ID NO:162); and/or a light chain variable region comprising the amino acid sequence of SEQ ID No: 57 of WO 2011/066389 (SEQ ID NO:163).

[0429] In an embodiment, the targeting moiety comprises the anti-PD-L1 antibody 2.7A4OPT, or fragments thereof, as disclosed in WO 2011/066389, U.S. Pat. No. 8,779,108, and US2014/0356353, and US2014/0356353, the entire disclosures of which are hereby incorporated by reference. In illustrative embodiments, 2.7A4OPT or an antigen-binding fragment thereof for use in the methods provided herein comprises a heavy chain variable region comprising the amino acid sequence of SEQ ID No: 62 of WO 2011/066389 (SEQ ID NO:164); and/or a light chain variable region comprising the amino acid sequence of SEQ ID No: 67 of WO 2011/066389 (SEQ ID NO:165).

[0430] In an embodiment, the targeting moiety comprises the anti-PD-L1 antibody 2.14H9OPT, or fragments thereof, as disclosed in WO 2011/066389, U.S. Pat. No. 8,779,108, and US2014/0356353, the entire disclosures of which are hereby incorporated by reference. In illustrative embodiments, 2.14H9OPT or an antigen-binding fragment thereof for use in the methods provided herein comprises a heavy chain variable region comprising the amino acid sequence of SEQ ID No: 72 of WO 2011/066389 (SEQ ID NO:166); and/or a light chain variable region comprising the amino acid sequence of SEQ ID No: 77 of WO 2011/066389 (SEQ ID NO:167).

[0431] In an embodiment, the targeting moiety comprises any one of the anti-PD-L1 antibodies disclosed in WO2016/061142, the entire contents of which are hereby incorporated by reference. In illustrative embodiments, the antibody or an antigen-binding fragment thereof for use in the methods provided herein comprises a heavy chain comprising an amino acid sequence selected from SEQ ID Nos: 18, 30, 38, 46, 50, 54, 62, 70, and 78 of WO2016/061142 (SEQ ID No: 18 of WO2016/061142 (SEQ ID NO:168); SEQ ID No: 30 of WO2016/061142 (SEQ ID NO: 169); SEQ ID No: 38 of WO2016/061142 (SEQ ID NO:170); SEQ ID No: 46 of WO2016/061142 (SEQ ID NO: 171); SEQ ID No: 50 of WO2016/061142 (SEQ ID NO:172); SEQ ID No: 54 of WO2016/061142 (SEQ ID NO: 173); SEQ ID No: 62 of WO2016/061142 (SEQ ID NO:174); SEQ ID No: 70 of WO2016/061142 (SEQ ID NO: 175); and SEQ ID No: 78 of WO2016/061142 (SEQ ID NO:176)); and/or a light chain comprising an amino acid sequence selected from SEQ ID Nos: 22, 26, 34, 42, 58, 66, 74, 82, and 86 of WO2016/061142; SEQ ID No: 22 of WO2016/061142 (SEQ ID NO:177); SEQ ID No: 26 of WO2016/061142 (SEQ ID NO:178); SEQ ID No: 34 of WO2016/061142 (SEQ ID NO:179); SEQ ID No: 42 of WO2016/061142 (SEQ ID NO:180); SEQ ID No: 58 of WO2016/061142 (SEQ ID NO:181); SEQ ID No: 66 of WO2016/061142 (SEQ ID NO:182); SEQ ID No: 74 of WO2016/061142 (SEQ ID NO:183); SEQ ID No: 82 of WO2016/061142 (SEQ ID NO:184); and SEQ ID No: 86 of WO2016/061142 (SEQ ID NO:185).

[0432] In an embodiment, the targeting moiety comprises any one of the anti-PD-L1 antibodies disclosed in WO2016/022630, the entire contents of which are hereby incorporated by reference. In illustrative embodiments, the antibody or an antigen-binding fragment thereof for use in the methods provided herein comprises a heavy chain comprising an amino acid sequence selected from SEQ ID Nos: 2, 6, 10, 14, 18, 22, 26, 30, 34, 38, 42, and 46 of WO2016/022630 (SEQ ID No: 2 of WO2016/022630 (SEQ ID NO:186); SEQ ID No: 6 of WO2016/022630 (SEQ ID NO:187); SEQ ID No: 10 of WO2016/022630 (SEQ ID NO:188); SEQ ID No: 14 of WO2016/022630 (SEQ ID NO: 189); SEQ ID No: 18 of WO2016/022630 (SEQ ID NO: 190); SEQ ID No: 22 of WO2016/022630 (SEQ ID NO: 191); SEQ ID No: 26 of WO2016/022630 (SEQ ID NO:192); SEQ ID No: 30 of WO2016/022630 (SEQ ID NO: 193); SEQ ID No: 34 of WO2016/022630 (SEQ ID NO:194); SEQ ID No: 38 of WO2016/022630 (SEQ ID NO: 195); SEQ ID No: 42 of WO2016/022630 (SEQ ID NO:196); and SEQ ID No: 46 of WO2016/022630 (SEQ ID NO: 197)); and/or a light chain comprising an amino acid sequence selected from SEQ ID Nos: 4, 8, 12, 16, 20, 24, 28, 32, 36, 40, 44, and 48 of WO2016/022630 (SEQ ID No: 4 of WO2016/022630 (SEQ ID NO:198); SEQ ID No: 8 of WO2016/022630 (SEQ ID NO:199); SEQ ID No: 12 of WO2016/022630 (SEQ ID NO:200); SEQ ID No: 16 of WO2016/022630 (SEQ ID NO:201); SEQ ID No: 20 of WO2016/022630 (SEQ ID NO:202); SEQ ID No: 24 of WO2016/022630 (SEQ ID NO:203); SEQ ID No: 28 of WO2016/022630 (SEQ ID NO:204); SEQ ID No: 32 of WO2016/022630 (SEQ ID NO:205); SEQ ID No: 36 of WO2016/022630 (SEQ ID NO:206); SEQ ID No: 40 of WO2016/022630 (SEQ ID NO:207); SEQ ID No: 44 of WO2016/022630 (SEQ ID NO:208); and SEQ ID No: 48 of WO2016/022630 (SEQ ID NO:209).

[0433] In an embodiment, the targeting moiety comprises any one of the anti-PD-L1 antibodies disclosed in WO2015/112900, the entire contents of which are hereby incorporated by reference. In illustrative embodiments, the antibody or an antigen-binding fragment thereof for use in the methods provided herein comprises a heavy chain comprising an amino acid sequence selected from SEQ ID Nos: 38, 50, 82, and 86 of WO 2015/112900 (SEQ ID No: 38 of WO2015/112900 (SEQ ID NO:210); SEQ ID No: 50 of WO 2015/112900 (SEQ ID NO:211); SEQ ID No: 82 of WO 2015/112900 (SEQ ID NO:212); and SEQ ID No: 86 of WO 2015/112900 (SEQ ID NO:213)); and/or a light chain comprising an amino acid sequence selected from SEQ ID Nos: 42, 46, 54, 58, 62, 66, 70, 74, and 78 of WO 2015/112900 (SEQ ID No: 42 of WO2015/112900 (SEQ ID NO:214); SEQ ID No: 46 of WO 2015/112900 (SEQ ID NO:215); SEQ ID No: 54 of WO 2015/112900 (SEQ ID NO:216); SEQ ID No: 58 of WO 2015/112900 (SEQ ID NO:217); SEQ ID No: 62 of WO 2015/112900 (SEQ ID NO:218); SEQ ID No: 66 of WO 2015/112900 (SEQ ID NO:219); SEQ ID No: 70 of WO 2015/112900 (SEQ ID NO:220); SEQ ID No: 74 of WO 2015/112900 (SEQ ID NO:221); and SEQ ID No: 78 of WO 2015/112900 (SEQ ID NO:222)).

[0434] In an embodiment, the targeting moiety comprises any one of the anti-PD-L1 antibodies disclosed in WO 2010/077634 and U.S. Pat. No. 8,217,149, the entire disclosures of which are hereby incorporated by reference. In illustrative embodiments, the anti-PD-L1 antibody or an antigen-binding fragment thereof for use in the methods provided herein comprises a heavy chain region comprising the amino acid sequence of SEQ ID No: 20 of WO 2010/077634 (SEQ ID NO:223); and/or a light chain variable region comprising the amino acid sequence of SEQ ID No: 21 of WO 2010/077634 (SEQ ID NO:224).

[0435] In an embodiment, the targeting moiety comprises any one of the anti-PD-L1 antibodies obtainable from the hybridoma accessible under CNCM deposit numbers CNCM I-4122, CNCM I-4080 and CNCM I-4081 as disclosed in US20120039906, the entire disclosures of which are hereby incorporated by reference.

[0436] In an embodiment, the targeting moiety comprises a VHH directed against PD-L1 as disclosed, for example, in U.S. Pat. No. 8,907,065 and WO 2008/071447, the entire disclosures of which are hereby incorporated by reference. In illustrative embodiments, the VHHs against PD-L1 comprise SEQ ID NOS: 394-399 of U.S. Pat. No. 8,907,065 (SEQ ID No: 394 of U.S. Pat. No. 8,907,065 (SEQ ID NO:225); SEQ ID No: 395 of U.S. Pat. No. 8,907,065 (SEQ ID NO:226); SEQ ID No: 396 of U.S. Pat. No. 8,907,065 (SEQ ID NO:227); SEQ ID No: 397 of U.S. Pat. No. 8,907,065 (SEQ ID NO:228); SEQ ID No: 398 of U.S. Pat. No. 8,907,065 (SEQ ID NO:229); and SEQ ID No: 399 of U.S. Pat. No. 8,907,065 (SEQ ID NO:230).

[0437] In various embodiments, the present invention contemplates the use of any natural or synthetic analogs, mutants, variants, alleles, homologs and orthologs (herein collectively referred to as “analogs”) of the PD-1 or PD-L1 targeting moieties described herein. In various embodiments, the amino acid sequence of the PD-1 or PD-L1 targeting moiety further includes an amino acid analog, an amino acid derivative, or other non-classical amino acids.

[0438] In various embodiments, the PD-1 or PD-L1 targeting moiety comprises a targeting moiety comprising a sequence that is at least 60% identical to any one of the PD-1 or PD-L1 sequences disclosed herein. For example, the PD-1 or PD-L1 targeting moiety may comprise a sequence that is at least about 60%, at least about 61%, at least about 62%, at least about 63%, at least about 64%, at least about 65%, at least about 66%, at least about 67%, at least about 68%, at least about 69%, at least about 70%, at least about 71%, at least about 72%, at least about 73%, at least about 74%, at least about 75%, at least about 76%, at least about 77%, at least about 78%, at least about 79%, at least about 80%, at least about 81%, at least about 82%, at least about 83%, at least about 84%, at least about 85%, at least about 86%, at least about 87%, at least about 88%, at least about 89%, at least about 90%, at least about 91%, at least about 92%, at least about 93%, at least about 94%, at least about 95%, at least about 96%, at least about 97%, at least about 98%, at least about 99%, or 100% identical to any of the sequences disclosed herein (e.g. about 60%, or about 61%, or about 62%, or about 63%, or about 64%, or about 65%, or about 66%, or about 67%, or about 68%, or about 69%, or about 70%, or about 71%, or about 72%, or about 73%, or about 74%, or about 75%, or about 76%, or about 77%, or about 78%, or about 79%, or about 80%, or about 81%, or about 82%, or about 83%, or about 84%, or about 85%, or about 86%, or about 87%, or about 88%, or about 89%, or about 90%, or about 91%, or about 92%, or about 93%, or about 94%, or about 95%, or about 96%, or about 97%, or about 98%, about 99% or about 100% sequence identity to any one of the PD-1 or PD-L1 targeting moiety sequences disclosed herein).

[0439] In various embodiments, the PD-1 or PD-L1 targeting moiety comprises an amino acid sequence having one or more amino acid mutations with respect to any one of the PD-1 or PD-L1 sequences disclosed herein. In various embodiments, the PD-1 or PD-L1 targeting moiety comprises an amino acid sequence having one, or two, or three, or four, or five, or six, or seen, or eight, or nine, or ten, or fifteen, or twenty amino acid mutations with respect to any one of the sequences disclosed herein. In some embodiments, the one or more amino acid mutations may be independently selected from substitutions, insertions, deletions, and truncations.

[0440] In some embodiments, the amino acid mutations are amino acid substitutions, and may include conservative and/or non-conservative substitutions.

[0441] “Conservative substitutions” may be made, for instance, on the basis of similarity in polarity, charge, size, solubility, hydrophobicity, hydrophilicity, and/or the amphipathic nature of the amino acid residues involved. The 20 naturally occurring amino acids can be grouped into the following six standard amino acid groups: (1) hydrophobic: Met, Ala, Val, Leu, Ile; (2) neutral hydrophilic: Cys, Ser, Thr; Asn, Gln; (3) acidic: Asp, Glu; (4) basic: His, Lys, Arg; (5) residues that influence chain orientation: Gly, Pro; and (6) aromatic: Trp, Tyr, Phe.

[0442] As used herein, “conservative substitutions” are defined as exchanges of an amino acid by another amino acid listed within the same group of the six standard amino acid groups shown above. For example, the exchange of Asp by Glu retains one negative charge in the so modified polypeptide. In addition, glycine and proline may be substituted for one another based on their ability to disrupt a-helices.

[0443] As used herein, “non-conservative substitutions” are defined as exchanges of an amino acid by another amino acid listed in a different group of the six standard amino acid groups (1) to (6) shown above.

[0444] In various embodiments, the substitutions may also include non-classical amino acids. Illustrative non-classical amino acids include, but are not limited to, selenocysteine, pyrrolysine, N-formylmethionine β-alanine, GABA and δ-Aminolevulinic acid, 4-aminobenzoic acid (PABA), D-isomers of the common amino acids, 2,4-diaminobutyric acid, α-amino isobutyric acid, 4-aminobutyric acid, Abu, 2-amino butyric acid, γ-Abu, ε-Ahx, 6-amino hexanoic acid, Aib, 2-amino isobutyric acid, 3-amino propionic acid, ornithine, norleucine, norvaline, hydroxyproline, sarcosme, citrulline, homocitrulline, cysteic acid, t-butylglycine, t-butylalanine, phenylglycine, cyclohexylalanine, β-alanine, fluoro-amino acids, designer amino acids such as β methyl amino acids, C α-methyl amino acids, N α-methyl amino acids, and amino acid analogs in general.

[0445] In various embodiments, the amino acid mutation may be in the CDRs of the targeting moiety (e.g., the CDR1, CDR2 or CDR3 regions). In another embodiment, amino acid alteration may be in the framework regions (FRs) of the targeting moiety (e.g., the FR1, FR2, FR3, or FR4 regions).

[0446] Modification of the amino acid sequences may be achieved using any known technique in the art e.g., site-directed mutagenesis or PCR based mutagenesis. Such techniques are described, for example, in Sambrook et al., Molecular Cloning: A Laboratory Manual, Cold Spring Harbor Press, Plainview, N.Y., 1989 and Ausubel et al., Current Protocols in Molecular Biology, John Wiley & Sons, New York, N.Y., 1989.

[0447] In various embodiments, the mutations do not substantially reduce the present PD-1 or PD-L1 targeting moiety's capability to specifically bind to PD-1 or PD-L1. In various embodiments, the mutations do not substantially reduce the present PD-1 or PD-L1 targeting moiety's capability to specifically bind to PD-1 or PD-L1 and without functionally modulating (e.g., partially or fully neutralizing) PD-1 or PD-L1.

[0448] In various embodiments, the binding affinity of the PD-1 or PD-L1 targeting moiety for the full-length and/or mature forms and/or isoforms and/or splice variants and/or fragments and/or monomeric and/or dimeric forms and/or any other naturally occurring or synthetic analogs, variants, or mutants (including monomeric and/or dimeric forms) of human PD-1 or PD-L1 may be described by the equilibrium dissociation constant (K_{D}). In various embodiments, the PD-1 or PD-L1 targeting moiety binds to the full-length and/or mature forms and/or isoforms and/or splice variants and/or fragments and/or any other naturally occurring or synthetic analogs, variants, or mutants (including monomeric and/or dimeric forms) of human PD-1 or PD-L1 with a K_{D} of less than about 1 μM, about 900 nM, about 800 nM, about 700 nM, about 600 nM, about 500 nM, about 400 nM, about 300 nM, about 200 nM, about 100 nM, about 90 nM, about 80 nM, about 70 nM, about 60 nM, about 50 nM, about 40 nM, about 30 nM, about 20 nM, about 10 nM, or about 5 nM, or about 1 nM.

[0449] In various embodiments, the PD-1 or PD-L1 targeting moiety binds but does not functionally modulate (e.g., partially or fully neutralize) the antigen of interest, i.e., PD-1 or PD-L1. For instance, in various embodiments, the PD-1 or PD-L1 targeting moiety simply targets the antigen but does not substantially functionally modulate (e.g. partially or fully inhibit, reduce or neutralize) a biological effect that the antigen has. In various embodiments, the targeting moiety of the PD-1 or PD-L1 targeting moiety binds an epitope that is physically separate from an antigen site that is important for its biological activity (e.g. an antigen's active site).

[0450] In various embodiments, these binding agents bind to, and functionally modulate (e.g. partially or fully neutralize) PD-1 or PD-L1.

[0451] In various embodiments, the present multi-specific chimeric protein or chimeric protein complex has one or more targeting moieties directed against PD-L2. In some embodiments, the chimeric protein or chimeric protein complex has one or more targeting moieties which selectively bind a PD-L2 polypeptide. In some embodiments, the chimeric protein or chimeric protein complex comprises one or more antibodies, antibody derivatives or formats, peptides or polypeptides, or fusion proteins that selectively bind a PD-L2 polypeptide.

[0452] In an embodiment, the targeting moiety comprises a VHH directed against PD-L2 as disclosed, for example, in U.S. Pat. No. 8,907,065 and WO 2008/071447, the entire disclosures of which are hereby incorporated by reference. In illustrative embodiments, the VHHs against PD-1 comprise SEQ ID Nos: 449-455 of U.S. Pat. No. 8,907,065 (SEQ ID No: 449 of U.S. Pat. No. 8,907,065 (SEQ ID NO:231); SEQ ID No: 450 of U.S. Pat. No. 8,907,065 (SEQ ID NO:232); SEQ ID No: 451 of U.S. Pat. No. 8,907,065 (SEQ ID NO:233); SEQ ID No: 452 of U.S. Pat. No. 8,907,065 (SEQ ID NO:234); SEQ ID No: 453 of U.S. Pat. No. 8,907,065 (SEQ ID NO:235); SEQ ID No: 454 of U.S. Pat. No. 8,907,065 (SEQ ID NO:236); and SEQ ID No: 455 of U.S. Pat. No. 8,907,065 (SEQ ID NO:237).

[0453] In some embodiments, the PD-L2 targeting moiety comprising an amino acid sequence selected from SEQ ID NOs: 231-237 having one or more substitutions at positions 11, 37, 44, 45, 47, 83, 84, 103, 104, and 108 (according to Kabat numbering). In some embodiments, the amino acid at position 11 is L, M, S, V, or W. In some embodiments, the amino acid at position 37 is F, Y, H, I, L, or V. In some embodiments, the amino acid at position 44 is G, E, A, D, Q, R, S, or L. In some embodiments, the amino acid at position 45 is L, R, C, I, L, P, Q, or V. In some embodiments, the amino acid at position 47 is W, L, F, A, G, I, M, R, S, V or Y. In some embodiments, the amino acid at position 83 is R, K, N, E, G, I, M, Q or T. In some embodiments, the amino acid at position 84 is P, A, L, R, S, T, D, or V. In some embodiments, the amino acid at position 103 is W, P, R, or S; 104-G or D. In some embodiments, the amino acid at position 108 is Q, L, or R.

[0454] In various embodiments, the PD-L2 targeting moiety comprises a VHH having a variable domain comprising at least one CDR1, CDR2, and/or CDR3 sequences. In various embodiments, the PD-L2 binding agent comprises a VHH having a variable region comprising at least one FR1, FR2, FR3, and FR4 sequences.

[0455] In some embodiments, the PD-L2 CDR1 sequence is selected from:

(SEQ ID NO: 701)
INAMG;
(SEQ ID NO: 702)
NYVSNYAMG;
(SEQ ID NO: 703)
IXVMG;
(SEQ ID NO: 704)
SGTMG;
(SEQ ID NO: 705)
YYGIG;
(SEQ ID NO: 706)
TYTMI;
and
(SEQ ID NO: 707)
SYDMS.

[0456] In some embodiments, the PD-L2 CDR2 sequence is selected from:

(SEQ ID NO: 708)
SISSGGSTNYADSVKG;
(SEQ ID NO: 709)
SISNGDTINYADSVKG;
(SEQ ID NO: 710)
AITSGGRTNYSDSVKG;
(SEQ ID NO: 711)
SIPWSGGRTYYADSVKD;
(SEQ ID NO: 712)
FISGSDGSTYYAESVKG;
(SEQ ID NO: 713)
TIDKDGNTNYVDSVKG;
and
(SEQ ID NO: 714)
TINSGGGITYRGSVKG.

[0457] In some embodiments, the PD-L2 CDR3 sequence is selected from:

(SEQ ID NO: 715)
DVYPQDYGLGYVEGKVYYGMDY;
(SEQ ID NO: 716)
HQVAGLT;
(SEQ ID NO: 717)
WNSGYPPVDY;
(SEQ ID NO: 718)
KERSTGWDFAS;
(SEQ ID NO: 719)
DPWGPPSIATMTSYEYKH;
(SEQ ID NO: 720)
HGSSA;
and
(SEQ ID NO: 721)
GGSSYR.

[0458] In an embodiment, the targeting moiety comprises any one of the anti-PD-L2 antibodies disclosed in US2011/0271358 and WO2010/036959, the entire contents of which are hereby incorporated by reference. In illustrative embodiments, the antibody or an antigen-binding fragment thereof for use in the methods provided herein comprises a heavy chain comprising an amino acid sequence selected from SEQ ID Nos: 43-47 of US2011/0271358 (SEQ ID No: 43 of US2011/0271358 (SEQ ID NO:238); SEQ ID No: 44 of US2011/0271358 (SEQ ID NO:239); SEQ ID No: 45 of US2011/0271358 (SEQ ID NO:240); SEQ ID No: 46 of US2011/0271358 (SEQ ID NO:241); and SEQ ID No: 47 of US2011/0271358 (SEQ ID NO:242)); and/or a light chain comprising an amino acid sequence selected from SEQ ID Nos: 48-51 of US2011/0271358 (SEQ ID No: 48 of US2011/0271358 (SEQ ID NO:243); SEQ ID No: 49 of US2011/0271358 (SEQ ID NO:244); SEQ ID No: 50 of US2011/0271358 (SEQ ID NO:245); and SEQ ID No: 51 of US2011/0271358 (SEQ ID NO:246)).

[0459] In various embodiments, the targeting moieties of the invention may comprise a sequence that targets PD-L2, which is at least about 60%, at least about 61%, at least about 62%, at least about 63%, at least about 64%, at least about 65%, at least about 66%, at least about 67%, at least about 68%, at least about 69%, at least about 70%, at least about 71%, at least about 72%, at least about 73%, at least about 74%, at least about 75%, at least about 76%, at least about 77%, at least about 78%, at least about 79%, at least about 80%, at least about 81%, at least about 82%, at least about 83%, at least about 84%, at least about 85%, at least about 86%, at least about 87%, at least about 88%, at least about 89%, at least about 90%, at least about 91%, at least about 92%, at least about 93%, at least about 94%, at least about 95%, at least about 96%, at least about 97%, at least about 98%, at least about 99%, or 100% identical to any of the sequences disclosed herein (e.g. about 60%, or about 61%, or about 62%, or about 63%, or about 64%, or about 65%, or about 66%, or about 67%, or about 68%, or about 69%, or about 70%, or about 71%, or about 72%, or about 73%, or about 74%, or about 75%, or about 76%, or about 77%, or about 78%, or about 79%, or about 80%, or about 81%, or about 82%, or about 83%, or about 84%, or about 85%, or about 86%, or about 87%, or about 88%, or about 89%, or about 90%, or about 91%, or about 92%, or about 93%, or about 94%, or about 95%, or about 96%, or about 97%, or about 98%, about 99% or about 100% sequence identity with any of the PD-L2 targeting sequences disclosed herein).

[0460] In various embodiments, the targeting moieties of the invention may comprise any combination of heavy chain, light chain, heavy chain variable region, light chain variable region, complementarity determining region (CDR), and framework region sequences that target PD-L2 as disclosed herein.

[0461] Additional antibodies, antibody derivatives or formats, peptides or polypeptides, or fusion proteins that selectively bind or target PD-1, PD-L1 and/or PD-L2 are disclosed in WO 2011/066389, US 2008/0025980, US 2013/0034559, U.S. Pat. No. 8,779,108, US 2014/0356353, U.S. Pat. No. 8,609,089, US 2010/028330, US 2012/0114649, WO 2010/027827, WO 2011/066342, U.S. Pat. No. 8,907,065, WO 2016/062722, WO 2009/101611, WO2010/027827, WO 2011/066342, WO 2007/005874, WO 2001/014556, US2011/0271358, WO 2010/036959, WO 2010/077634, U.S. Pat. No. 8,217,149, US 2012/0039906, WO 2012/145493, US 2011/0318373, U.S. Pat. No. 8,779,108, US20140044738, WO 2009/089149, WO 2007/00587, WO 2016061142, WO 2016,02263, WO 2010/077634, and WO 2015/112900, the entire disclosures of which are hereby incorporated by reference.

[0462] In various embodiments, the present multi-specific chimeric protein or chimeric protein complex has one or more targeting moieties directed against Clec9A. In various embodiments, the Clec9A targeting moiety is a protein-based agent capable of specific binding to Clec9A without functional modulation (e.g., partial or full neutralization) of Clec9A. Clec9A is a group V C-type lectin-like receptor (CTLR) expressed on the surface of a subset of dendritic cells (i.e., BDCA3+dendritic cells) specialized for the uptake and processing of materials from dead cells. Clec9A recognizes a conserved component within nucleated and non-nucleated cells, exposed when cell membranes are damaged. Clec9A is expressed at the cell surface as a glycosylated dimer and can mediate endocytosis, but not phagocytosis. Clec9A possesses a cytoplasmic immunoreceptor tyrosine-based activation-like motif that can recruit Syk kinase and induce pro-inflammatory cytokine production (see Huysamen et al. (2008), JBC, 283:16693-701).

[0463] In various embodiments, the Clec9A targeting moiety comprises an antigen recognition domain that recognizes an epitope present on Clec9A. In an embodiment, the antigen-recognition domain recognizes one or more linear epitopes present on Clec9A. As used herein, a linear epitope refers to any continuous sequence of amino acids present on Clec9A. In another embodiment, the antigen-recognition domain recognizes one or more conformational epitopes present on Clec9A. As used herein, a conformation epitope refers to one or more sections of amino acids (which may be discontinuous) which form a three-dimensional surface with features and/or shapes and/or tertiary structures capable of being recognized by an antigen recognition domain.

[0464] In various embodiments, the Clec9A targeting moiety may bind to the full-length and/or mature forms and/or isoforms and/or splice variants and/or fragments and/or any other naturally occurring or synthetic analogs, variants, or mutants of human Clec9A. In various embodiments, the Clec9A targeting moiety may bind to any forms of the human Clec9A, including monomeric, dimeric, heterodimeric, multimeric and associated forms. In an embodiment, the Clec9A targeting moiety binds to the monomeric form of Clec9A. In another embodiment, the Clec9A targeting moiety binds to a dimeric form of Clec9A. In a further embodiment, the Clec9A targeting moiety binds to glycosylated form of Clec9A, which may be either monomeric or dimeric.

[0465] In an embodiment, the Clec9A targeting moiety comprises an antigen recognition domain that recognizes one or more epitopes present on human Clec9A. In an embodiment, the human Clec9A comprises the amino acid sequence of:

(SEQ ID NO: 722)
MHEEEIYTSLQWDSPAPDTYQKCLSSNKCSGACCLVMVISCVFCMGLLTAS
IFLGVKLLQVSTIAMQQQEKLIQQERALLNFTEWKRSCALQMKYCQAFMQN
SLSSAHNSSPCPNNWIQNRESCYYVSEIWSIWHTSQENCLKEGSTLLQIES
KEEMDFITGSLRKIKGSYDYWVGLSQDGHSGRWLWQDGSSPSPGLLPAERS
QSANQVCGYVKSNSLLSSNCSTWKYFICEKYALRSSV.

[0466] In various embodiments, the Clec9A targeting moiety is capable of specific binding. In various embodiments, the Clec9A targeting moiety comprises an antigen recognition domain such as an antibody or derivatives thereof. In an embodiment, the Clec9A targeting moiety comprises an antibody. In various embodiments, the antibody is a full-length multimeric protein that includes two heavy chains and two light chains. Each heavy chain includes one variable region (e.g., V_{H}) and at least three constant regions (e.g., CH₁, CH₂ and CH₃), and each light chain includes one variable region (V_{L}) and one constant region (C_{L}). The variable regions determine the specificity of the antibody. Each variable region comprises three hypervariable regions also known as complementarity determining regions (CDRs) flanked by four relatively conserved framework regions (FRs). The three CDRs, referred to as CDR1, CDR2, and CDR3, contribute to the antibody binding specificity. In some embodiments, the antibody is a chimeric antibody. In some embodiments, the antibody is a humanized antibody.

[0467] In some embodiments, the Clec9A targeting moiety comprises an antibody derivative or format. In some embodiments, the Clec9A targeting moiety comprises a single-domain antibody, a recombinant heavy-chain-only antibody (VHH), a single-chain antibody (scFv), a shark heavy-chain-only antibody (VNAR), a microprotein (cysteine knot protein, knottin), a DARPin; a Tetranectin; an Affibody; a Transbody; an Anticalin; an AdNectin; an Affilin; an Affimer, a Microbody; an aptamer; an alterase; a plastic antibody; a phylomer; a stradobody; a maxibody; an evibody; a fynomer, an armadillo repeat protein, a Kunitz domain, an avimer, an atrimer, a probody, an immunobody, a triomab, a troybody; a pepbody; a vaccibody, a UniBody; a DuoBody, a Fv, a Fab, a Fab′, a F(ab′)₂, a peptide mimetic molecule, or a synthetic molecule, as described in US Patent Nos. or Patent Publication Nos. U.S. Pat. No. 7,417,130, US 2004/132094, U.S. Pat. No. 5,831,012, US 2004/023334, U.S. Pat. Nos. 7,250,297, 6,818,418, US 2004/209243, U.S. Pat. Nos. 7,838,629, 7,186,524, 6,004,746, 5,475,096, US 2004/146938, US 2004/157209, U.S. Pat. Nos. 6,994,982, 6,794,144, US 2010/239633, U.S. Pat. No. 7,803,907, US 2010/119446, and/or U.S. Pat. No. 7,166,697, the contents of which are hereby incorporated by reference in their entireties. See also, Storz MAbs. 2011 May-Jun; 3 (3): 310-317.

[0468] In some embodiments, the Clec9A binding agent comprises a targeting moiety which is a single-domain antibody, such as a VHH. The VHH may be derived from, for example, an organism that produces VHH antibody such as a camelid, a shark, or the VHH may be a designed VHH. VHHs are antibody-derived therapeutic proteins that contain the unique structural and functional properties of naturally-occurring heavy-chain antibodies. VHH technology is based on fully functional antibodies from camelids that lack light chains. These heavy-chain antibodies contain a single variable domain (VHH) and two constant domains (CH₂ and CH₃).

[0469] In an embodiment, the Clec9A targeting moiety comprises a VHH. In some embodiments, the VHH is a humanized VHH or camelized VHH.

[0470] In some embodiments, the VHH comprises a fully human V_{H} domain, e.g. a HUMABODY (Crescendo Biologics, Cambridge, UK). In some embodiments, fully human V_{H} domain, e.g. a HUMABODY is monovalent, bivalent, or trivalent. In some embodiments, the fully human V_{H} domain, e.g. a HUMABODY is mono- or multi-specific such as monospecific, bispecific, or trispecific. Illustrative fully human V_{H} domains, e.g. a HUMABODIES are described in, for example, WO2016/113555 and WO2016/113557, the entire disclosure of which is incorporated by reference.

[0471] In some embodiments, the Clec9A targeting moiety comprises a VHH comprising a single amino acid chain having four “framework regions” or FRs and three “complementary determining regions” or CDRs. As used herein, “framework region” or “FR” refers to a region in the variable domain which is located between the CDRs. As used herein, “complementary determining region” or “CDR” refers to variable regions in VHHs that contains the amino acid sequences capable of specifically binding to antigenic targets.

[0472] In various embodiments, the Clec9A targeting moiety comprises a VHH having a variable domain comprising at least one CDR1, CDR2, and/or CDR3 sequences. In various embodiments, the Clec9A targeting moiety comprises a VHH having a variable region comprising at least one FR1, FR2, FR3, and FR4 sequences.

[0473] In some embodiments, the CDR1 sequence of the Clec9A targeting moiety is selected from:

(SEQ ID NO: 723)
GSISSINVMG;
(SEQ ID NO: 724)
GSFSSINVMG;
(SEQ ID NO: 725)
GSISSINIMG;
(SEQ ID NO: 726)
GSISSINIMG;
(SEQ ID NO: 727)
VSIFSINAMG;
(SEQ ID NO: 728)
GSIFSLNAMG;
(SEQ ID NO: 729)
GRTISNYDMA;
(SEQ ID NO: 730)
GRTFTTSLMQ;
(SEQ ID NO: 731)
ERNLRIYDMA;
(SEQ ID NO: 732)
ERNLRSYDMA;
(SEQ ID NO: 733)
GLTFSNYHMG;
(SEQ ID NO: 734)
GLTFSSYHMG;
(SEQ ID NO: 735)
GLTFSRYHMG;
(SEQ ID NO: 736)
GLTLSSYYIA;
(SEQ ID NO: 737)
GLTFSSYYTG;
(SEQ ID NO: 738)
GLTLSSYHMG;
(SEQ ID NO: 739)
GRTSSPYVTG;
(SEQ ID NO: 740)
GFTFSGYVMS;
(SEQ ID NO: 741)
GFTFSGYVMT;
(SEQ ID NO: 742)
GFTFSGYLMS;
(SEQ ID NO: 743)
GRISSINSMG;
(SEQ ID NO: 744)
GSITSINAMG;
(SEQ ID NO: 745)
GRFFRVNAMG;
(SEQ ID NO: 746)
GSSDSINAMG;
(SEQ ID NO: 747)
GSVFSINAWG;
(SEQ ID NO: 748)
GSILSINSMG;
(SEQ ID NO: 749)
VSISSINSMG;
(SEQ ID NO: 750)
GRVFSINAMG;
(SEQ ID NO: 751)
VNIDTLNSMA;
(SEQ ID NO: 752)
GGISSINSMG;
(SEQ ID NO: 753)
GSMHSVNSMA;
(SEQ ID NO: 754)
GDISSINAMG;
(SEQ ID NO: 755)
GSIFSIDAMG;
(SEQ ID NO: 756)
GSIFSINAMG;
(SEQ ID NO: 757)
GSIFSIAAMG;
(SEQ ID NO: 758)
GNIASITAMG;
(SEQ ID NO: 759)
GFTFDDYAIG;
(SEQ ID NO: 760)
GSISSINAMG;
(SEQ ID NO: 761)
VSIFRSYFMG;
(SEQ ID NO: 762)
GSIVSINAIG;
(SEQ ID NO: 763)
GSIFSINAMG;
(SEQ ID NO: 764)
RSFSSFNAMG;
(SEQ ID NO: 765)
GSFSSINAMG;
(SEQ ID NO: 766)
GTSFSINGMA;
(SEQ ID NO: 767)
GRTFSTYAMG;
(SEQ ID NO: 768)
GSIFSINAMG;
(SEQ ID NO: 769)
GRIFDINAMG;
(SEQ ID NO: 770)
GTLFSINGMA;
(SEQ ID NO: 771)
GSIDSINAMG;
(SEQ ID NO: 772)
GRAFSTNSMG;
(SEQ ID NO: 773)
GSIISINSMG;
(SEQ ID NO: 774)
RNFFSINAMG;
(SEQ ID NO: 775)
GRFFRVNAMG;
(SEQ ID NO: 776)
GSIVSINSMG;
(SEQ ID NO: 777)
GSIFSINAMG;
(SEQ ID NO: 778)
GSIIGINSMG;
(SEQ ID NO: 779)
GRTFPGYVMA;
(SEQ ID NO: 780)
GSIFSINAMG;
(SEQ ID NO: 781)
GRTFSINAMG;
(SEQ ID NO: 782)
GRTLSSYTIG;
(SEQ ID NO: 783)
GSFFSINAMG;
(SEQ ID NO: 784)
GSIFSINSMG;
(SEQ ID NO: 785)
GSIFSFNAMG;
(SEQ ID NO: 786)
GSIFSINAMG;
(SEQ ID NO: 787)
GRTFSTYAMA;
(SEQ ID NO: 788)
GSFFSINAMG;
(SEQ ID NO: 789)
VNIGSLNSMV;
(SEQ ID NO: 790)
GRTLSNYAVG;
(SEQ ID NO: 791)
GSISSINAMG;
(SEQ ID NO: 792)
GRFFRVNAMG;
(SEQ ID NO: 793)
GSVFSINAMG;
(SEQ ID NO: 794)
GSIFEINSIG;
(SEQ ID NO: 795)
GSIFNINSMG;
(SEQ ID NO: 796)
VNIGTLNSMA;
(SEQ ID NO: 797)
GSIFSINSMG;
(SEQ ID NO: 798)
GRIGSINSMG;
(SEQ ID NO: 799)
GSIFSFNAMG;
(SEQ ID NO: 800)
GRISSINSMG;
(SEQ ID NO: 801)
GRTLSNYAVA;
(SEQ ID NO: 802)
GRIGSINSMG;
(SEQ ID NO: 803)
RSFFSFNAMG;
(SEQ ID NO: 804)
GRFFRVNAMG;
(SEQ ID NO: 805)
GIIFSINAMG;
(SEQ ID NO: 806)
GRTLSNYAVA;
(SEQ ID NO: 807)
GRIFSVNAMG;
(SEQ ID NO: 808)
GRTFSSYAMA;
(SEQ ID NO: 809)
GSFSSINVMG;
(SEQ ID NO: 810)
INSMG;
(SEQ ID NO: 811)
INAMG;
(SEQ ID NO: 812)
VNAMG;
(SEQ ID NO: 813)
INAWG;
(SEQ ID NO: 814)
LNSMA;
(SEQ ID NO: 815)
VNSMA;
(SEQ ID NO: 816)
IDAMG;
(SEQ ID NO: 817)
IAAMG;
(SEQ ID NO: 818)
SITAMG;
(SEQ ID NO: 819)
DYAIG;
(SEQ ID NO: 820)
SYFMG;
(SEQ ID NO: 821)
INAIG;
(SEQ ID NO: 822)
FNAMG;
(SEQ ID NO: 823)
INGMA;
(SEQ ID NO: 824)
TYAMG;
(SEQ ID NO: 825)
TNSMG;
(SEQ ID NO: 826)
GYVMA;
(SEQ ID NO: 827)
SYTIG;
(SEQ ID NO: 828)
TYAMA;
(SEQ ID NO: 829)
LNSMV;
(SEQ ID NO: 830)
NYAVG;
(SEQ ID NO: 831)
INSIG;
(SEQ ID NO: 832)
NYAVA;
(SEQ ID NO: 833)
SYAMA;
and
(SEQ ID NO: 834)
INVMG.

[0474] In some embodiments, the CDR2 sequence of the Clec9A targeting moiety is selected from:

(SEQ ID NO: 835)
RITNLGLPNYADWLKD;
(SEQ ID NO: 836)
RITNLGLPNYADSVTG;
(SEQ ID NO: 837)
RITNIGLPNYADSVKG;
(SEQ ID NO: 838)
RITNLGLPNYADSVEG;
(SEQ ID NO: 839)
AITSGGRVVYSDSVKG;
(SEQ ID NO: 840)
AITSGGRTAYADSVKG;
(SEQ ID NO: 841)
HITSDGRIVYADPVKG;
(SEQ ID NO: 842)
RISGSGDRTDYADSVKG;
(SEQ ID NO: 843)
SITWSTGNTHYADSVKG;
(SEQ ID NO: 844)
VISSSGDSTHYSDFVKG;
(SEQ ID NO: 845)
VITSSGDSTHYSDFVKG;
(SEQ ID NO: 846)
QITWSDASIYYAGSVKG;
(SEQ ID NO: 847)
QITWSDTSIYYAGSVKG;
(SEQ ID NO: 848)
QITWSDGTTYYPGSVKG;
(SEQ ID NO: 849)
QIRWSDDSTYYPGSVKG;
(SEQ ID NO: 850)
QISWSDDSTYYADSVKG;
(SEQ ID NO: 851)
TVSWGGVTYYADSVKG;
(SEQ ID NO: 852)
SIGSGGGYPSYTDSVEG;
(SEQ ID NO: 853)
SIGSGGGYPSYTGSVEG;
(SEQ ID NO: 854)
HIGSGGGYPSYTDSVQG;
(SEQ ID NO: 855)
HIGSGGGHATYTDSVEG;
(SEQ ID NO: 856)
TIGSGGGITSYADSVKG;
(SEQ ID NO: 857)
AITNGGAKTYADSVKG;
(SEQ ID NO: 858)
AITSGGRLSYADSVKG;
(SEQ ID NO: 859)
AITNGGQTAYADSVKG;
(SEQ ID NO: 860)
AITSGGRSTYIDSAKG;
(SEQ ID NO: 861)
AITNQGRIAYAPSVNG;
(SEQ ID NO: 862)
AITNDGRTTYVDSVKG;
(SEQ ID NO: 863)
AVTVGGRYAYADSAKN;
(SEQ ID NO: 864)
AITNQGATTYADSVKG;
(SEQ ID NO: 865)
GITGSGQITYANSVRG;
(SEQ ID NO: 866)
AITNGGRTVYGDSVKG;
(SEQ ID NO: 867)
AITSGGRLAYAPSVNG;
(SEQ ID NO: 868)
AITNGGRTTYVDSVKG;
(SEQ ID NO: 869)
AITTGGRTTYVDSVKG;
(SEQ ID NO: 870)
AITNQGRLTYADSVKG;
(SEQ ID NO: 871)
AITSGGRRAYADSVKG;
(SEQ ID NO: 872)
AITSASASRTTYADSVKG;
(SEQ ID NO: 873)
CISRSDGSTYYDDSVKG;
(SEQ ID NO: 874)
AITNQGRVTYADSVKG;
(SEQ ID NO: 875)
AITDGGRLAYADSAKG;
(SEQ ID NO: 876)
SITNQGIRNYSTSVMG;
(SEQ ID NO: 877)
AITNQGRTTYADSVKG;
(SEQ ID NO: 878)
AITNGGRIAYGIAVNG;
(SEQ ID NO: 879)
AITNGGRIAYSDSAKG;
(SEQ ID NO: 880)
GITSDGSTGYADSVKG;
(SEQ ID NO: 881)
AISWSGGSTYYADSVKG;
(SEQ ID NO: 882)
AITDQGRLAYADSAKG;
(SEQ ID NO: 883)
AITNGGQTTYADSVKG;
(SEQ ID NO: 884)
GITSDGSTGYADSVKG;
(SEQ ID NO: 885)
AITTGGRTAYVDSVKG;
(SEQ ID NO: 886)
AITSQGRITLADSVKG;
(SEQ ID NO: 887)
AITVDGRLAYADSAKH;
(SEQ ID NO: 888)
AITNGGRIAYGTSVMG;
(SEQ ID NO: 889)
AITNGGQIAYADSVKG;
(SEQ ID NO: 890)
AITDQGRTTYADSVKG;
(SEQ ID NO: 891)
GITTQGRITYGNSVRG;
(SEQ ID NO: 892)
AITSGGRTTYVDSVKG;
(SEQ ID NO: 893)
AINWRGGDTYYADSVKG;
(SEQ ID NO: 894)
AITDGGAKTYADSVKG;
(SEQ ID NO: 895)
AITNQGRLSYVDSVKG;
(SEQ ID NO: 896)
AITNQGRRTYADSVKG;
(SEQ ID NO: 897)
AITNGGRIAYTDSVKG;
(SEQ ID NO: 898)
AITNGGRTTYADSVKG;
(SEQ ID NO: 899)
AITDGGRLTYADSAKG;
(SEQ ID NO: 900)
AITTGGRTTYVDSVKG;
(SEQ ID NO: 901)
AISWSGGSTEYHDSVKG;
(SEQ ID NO: 902)
AITNQGRIAYADSVKG;
(SEQ ID NO: 903)
GITGSGQITYANSVRG;
(SEQ ID NO: 904)
AINWSSGGISYSNSAKG;
(SEQ ID NO: 905)
AITGQGRTTYADSVKG;
(SEQ ID NO: 906)
AITNGGQIVYADSVKG;
(SEQ ID NO: 907)
AITTQGRTTYEDSVKG;
(SEQ ID NO: 908)
AITSGGITNYANSVQG;
(SEQ ID NO: 909)
AITVGGRLAYADSAKG;
(SEQ ID NO: 910)
GITGGGQITYANSVRG;
(SEQ ID NO: 911)
AITSQGRSTYADSAKG;
(SEQ ID NO: 912)
AITNGGATVYADSVKG;
(SEQ ID NO: 913)
AITDGGRLTYADSAKN;
(SEQ ID NO: 914)
AITNGGAKTYADSVKG;
(SEQ ID NO: 915)
AINWSSGGISYSNAAKG;
(SEQ ID NO: 916)
AITNGGATVYADSVKG;
(SEQ ID NO: 917)
AITNGGRIAYGTSVMG;
(SEQ ID NO: 918)
AITNGGQTAYADSVKG;
(SEQ ID NO: 919)
AITNXGRTTYADSVKG;
(SEQ ID NO: 920)
AIWWASGGISYANSAKG;
(SEQ ID NO: 921)
AITNQGAPTYADSVKG;
(SEQ ID NO: 922)
RITNLGLPNYADSVTG;
(SEQ ID NO: 923)
RITNLGLPNYADSVKG;
(SEQ ID NO: 924)
AITNGGAKT;
(SEQ ID NO: 925)
AITSGGRLS;
(SEQ ID NO: 926)
AITNGGQTA;
(SEQ ID NO: 927)
AITSGGRST;
(SEQ ID NO: 928)
ITNQGRIA;
(SEQ ID NO: 929)
ITNQGRIAYAPSVNG;
(SEQ ID NO: 930)
AITNDGRTT;
(SEQ ID NO: 931)
AVTVGGRYA;
(SEQ ID NO: 932)
AITNQGATT;
(SEQ ID NO: 933)
GITGSGQIT;
(SEQ ID NO: 934)
AITNGGRTV;
(SEQ ID NO: 935)
AITSGGRLA;
(SEQ ID NO: 936)
AITNGGRTT;
(SEQ ID NO: 937)
AITTGGRTT;
(SEQ ID NO: 938)
AITNQGRLT;
(SEQ ID NO: 939)
AITSGGRRA;
(SEQ ID NO: 940)
AITSASASRTT;
(SEQ ID NO: 941)
CISRSDGSTY;
(SEQ ID NO: 942)
AITNQGRVT;
(SEQ ID NO: 943)
AITDGGRLA;
(SEQ ID NO: 944)
SITNQGIRN;
(SEQ ID NO: 945)
AITNQGRTT;
(SEQ ID NO: 946)
AITNGGRIA;
(SEQ ID NO: 947)
GITSDGSTG;
(SEQ ID NO: 948)
AISWSGGSTY;
(SEQ ID NO: 949)
AITDQGRLA;
(SEQ ID NO: 950)
AITNGGQTT;
(SEQ ID NO: 951)
AITTGGRTA;
(SEQ ID NO: 952)
AITSQGRIT;
(SEQ ID NO: 953)
AITVDGRLA;
(SEQ ID NO: 954)
AITNGGQIA;
(SEQ ID NO: 955)
AITDQGRTT;
(SEQ ID NO: 956)
GITTQGRIT;
(SEQ ID NO: 957)
AITSGGRTT;
(SEQ ID NO: 958)
AINWRGGDTY;
(SEQ ID NO: 959)
AITDGGAKT;
(SEQ ID NO: 960)
AITNQGRLS;
(SEQ ID NO: 961)
AITNQGRRT;
(SEQ ID NO: 962)
AITDGGRLT;
(SEQ ID NO: 963)
AISWSGGSTE;
(SEQ ID NO: 964)
AITNQGRIA;
(SEQ ID NO: 965)
AINWSSGGIS;
(SEQ ID NO: 966)
AITGQGRTT;
(SEQ ID NO: 967)
AITNGGQIV;
(SEQ ID NO: 968)
AITTQGRTT;
(SEQ ID NO: 969)
AITSGGITN;
(SEQ ID NO: 970)
AITVGGRLA;
(SEQ ID NO: 971)
GITGGGQIT;
(SEQ ID NO: 972)
AITSQGRST;
(SEQ ID NO: 973)
AITNGGATV;
(SEQ ID NO: 974)
AITNXGRTT;
(SEQ ID NO: 975)
AIWWASGGIS;
(SEQ ID NO: 976)
AITNQGAPT;
and
(SEQ ID NO: 977)
RITNLGLPN.

[0475] In some embodiments, the CDR3 sequence of the Clec9A targeting moiety is selected from:

(SEQ ID NO: 978)
VALSAEY;
(SEQ ID NO: 979)
VALKAEY;
(SEQ ID NO: 980)
VGLKAEY;
(SEQ ID NO: 981)
KTKSAVLFGGMDY;
(SEQ ID NO: 982)
YIRGEDY;
(SEQ ID NO: 983)
KHYASNY;
(SEQ ID NO: 984)
QDFGSPSF;
(SEQ ID NO: 985)
QDFRSPDF;
(SEQ ID NO: 986)
QIFGSPNF;
(SEQ ID NO: 987)
LAIHGDY;
(SEQ ID NO: 988)
NQIRQWP;
(SEQ ID NO: 989)
NSIRQWP;
(SEQ ID NO: 990)
NAIRQWP;
(SEQ ID NO: 991)
RKVGGPDY;
(SEQ ID NO: 992)
NTFGNVY;
LGR;
VIK;
(SEQ ID NO: 993)
FTRRDDY;
(SEQ ID NO: 994)
FQSSGID;
(SEQ ID NO: 995)
WAADYQQY;
(SEQ ID NO: 996)
WNRDRQQY;
(SEQ ID NO: 997)
KPTPVYGSTVGDY;
(SEQ ID NO: 998)
FTRDKDY;
(SEQ ID NO: 999)
WDRDRQQY;
(SEQ ID NO: 1000)
FTRTDDY;
(SEQ ID NO: 1001)
YDRSSTPY;
(SEQ ID NO: 1002)
FTRGDDY;
(SEQ ID NO: 1003)
LNSATTY;
(SEQ ID NO: 1004)
YTRDEDY;
(SEQ ID NO: 1005)
FTRDEDY;
(SEQ ID NO: 1006)
KWYDPLVIEYYDN;
(SEQ ID NO: 1007)
KADHNDY;
(SEQ ID NO: 1008)
FRSGADDY;
(SEQ ID NO: 1009)
EVPSTYSCSGFREDY;
(SEQ ID NO: 1010)
FAASGMEY;
(SEQ ID NO: 1011)
WTTDRQQY;
(SEQ ID NO: 1012)
FAGWGKEDY;
(SEQ ID NO: 1013)
FSPTGDY;
(SEQ ID NO: 1014)
KPTPVYGSTVGDY;
(SEQ ID NO: 1015)
KASPVYGSTVEDY;
(SEQ ID NO: 1016)
STPRGDSY;
(SEQ ID NO: 1017)
EAEGSGREGNFYERS;
(SEQ ID NO: 1018)
WDRDRQQY;
(SEQ ID NO: 1019)
FTRSDDY;
(SEQ ID NO: 1020)
STPRGDSY;
(SEQ ID NO: 1021)
FTRDTDY;
(SEQ ID NO: 1022)
WTTLGTF;
(SEQ ID NO: 1023)
WVRDGQQY;
(SEQ ID NO: 1024)
KAIPVYGSTVEDY;
(SEQ ID NO: 1025)
KAAATHLSTVADY;
(SEQ ID NO: 1026)
FGRFDDY;
(SEQ ID NO: 1027)
WGVKTGPESGSGTL;
(SEQ ID NO: 1028)
FTRDEDY;
(SEQ ID NO: 1029)
RLTTEYDYAY;
(SEQ ID NO: 1030)
FTRGNDY;
(SEQ ID NO: 1031)
FQSSGID;
(SEQ ID NO: 1032)
FSPTDDF;
(SEQ ID NO: 1033)
KAIPIYGSTAEDY;
(SEQ ID NO: 1034)
FSLTDDY;
(SEQ ID NO: 1035)
WTRDRQQY;
(SEQ ID NO: 1036)
FTRDEDF;
(SEQ ID NO: 1037)
EVEGSGREGNFYGA;
(SEQ ID NO: 1038)
PGWDY;
(SEQ ID NO: 1039)
YDRSATAY;
(SEQ ID NO: 1040)
ASSVLSGTVDY;
(SEQ ID NO: 1041)
FAADGMEY;
(SEQ ID NO: 1042)
KAAASYVSTVADY;
(SEQ ID NO: 1043)
TAKDDY;
(SEQ ID NO: 1044)
FTGWGKEDY;
(SEQ ID NO: 1045)
WAADYQQY;
(SEQ ID NO: 1046)
YDRSATPY;
(SEQ ID NO: 1047)
WARDRQQY;
(SEQ ID NO: 1048)
FTRGDDY;
(SEQ ID NO: 1049)
WTKDRQQY;
(SEQ ID NO: 1050)
FTRTYDY;
(SEQ ID NO: 1051)
ASSILSGTVDY;
(SEQ ID NO: 1052)
WAADYQQY;
(SEQ ID NO: 1053)
KPAPVYGSTVGDY;
(SEQ ID NO: 1054)
FAADGMEY;
(SEQ ID NO: 1055)
FGSGGG;
(SEQ ID NO: 1056)
ASSVLSGTADY;
(SEQ ID NO: 1057)
FTRGDDY;
and
(SEQ ID NO: 1058)
EAEGSGREGNFYERS.

[0476] In an illustrative embodiment, the Clec9A binding agent comprises SEQ ID NO: 723, SEQ ID NO: 835, and SEQ ID NO: 978.

[0477] In an illustrative embodiment, the Clec9A binding agent comprises SEQ ID NO: 724, SEQ ID NO: 836, and SEQ ID NO: 979.

[0478] In an illustrative embodiment, the Clec9A binding agent comprises SEQ ID NO: 725, SEQ ID NO: 837, and SEQ ID NO: 979.

[0479] In an illustrative embodiment, the Clec9A binding agent comprises SEQ ID NO: 723, SEQ ID NO: 838, and SEQ ID NO: 980.

[0480] In an illustrative embodiment, the Clec9A binding agent comprises SEQ ID NO: 726, SEQ ID NO: 839, and SEQ ID NO: 981.

[0481] In an illustrative embodiment, the Clec9A binding agent comprises SEQ ID NO: 727, SEQ ID NO: 840, and SEQ ID NO: 982.

[0482] In an illustrative embodiment, the Clec9A binding agent comprises SEQ ID NO: 728, SEQ ID NO: 841, and SEQ ID NO: 983.

[0483] In an illustrative embodiment, the Clec9A binding agent comprises SEQ ID NO: 729, SEQ ID NO: 842, and SEQ ID NO: 984.

[0484] In an illustrative embodiment, the Clec9A binding agent comprises SEQ ID NO: 729, SEQ ID NO: 842, and SEQ ID NO: 985.

[0485] In an illustrative embodiment, the Clec9A binding agent comprises SEQ ID NO: 729, SEQ ID NO: 842, and SEQ ID NO: 986.

[0486] In an illustrative embodiment, the Clec9A binding agent comprises SEQ ID NO: 730, SEQ ID NO: 843, and SEQ ID NO: 987.

[0487] In an illustrative embodiment, the Clec9A binding agent comprises SEQ ID NO: 731, SEQ ID NO: 844, and SEQ ID NO: 988.

[0488] In an illustrative embodiment, the Clec9A binding agent comprises SEQ ID NO: 731, SEQ ID NO: 845, and SEQ ID NO: 989.

[0489] In an illustrative embodiment, the Clec9A binding agent comprises SEQ ID NO: 732, SEQ ID NO: 846, and SEQ ID NO: 990.

[0490] In an illustrative embodiment, the Clec9A binding agent comprises SEQ ID NO: 733, SEQ ID NO: 847, and SEQ ID NO: 991.

[0491] In an illustrative embodiment, the Clec9A binding agent comprises SEQ ID NO: 733, SEQ ID NO: 848, and SEQ ID NO: 991.

[0492] In an illustrative embodiment, the Clec9A binding agent comprises SEQ ID NO: 734, SEQ ID NO: 849, and SEQ ID NO: 991.

[0493] In an illustrative embodiment, the Clec9A binding agent comprises SEQ ID NO: 735, SEQ ID NO: 850, and SEQ ID NO: 991.

[0494] In an illustrative embodiment, the Clec9A binding agent comprises SEQ ID NO: 736, SEQ ID NO: 851, and SEQ ID NO: 991.

[0495] In an illustrative embodiment, the Clec9A binding agent comprises SEQ ID NO: 737, SEQ ID NO: 851, and SEQ ID NO: 991.

[0496] In an illustrative embodiment, the Clec9A binding agent comprises SEQ ID NO: 738, SEQ ID NO: 852, and SEQ ID NO: 992.

[0497] In an illustrative embodiment, the Clec9A binding agent comprises SEQ ID NO: 739, SEQ ID NO: 853, and LGR.

[0498] In an illustrative embodiment, the Clec9A binding agent comprises SEQ ID NO: 739, SEQ ID NO: 854, and LGR.

[0499] In an illustrative embodiment, the Clec9A binding agent comprises SEQ ID NO: 739, SEQ ID NO: 855, and LGR.

[0500] In an illustrative embodiment, the Clec9A binding agent comprises SEQ ID NO: 740, SEQ ID NO: 856, and LGR.

[0501] In an illustrative embodiment, the Clec9A binding agent comprises SEQ ID NO: 741, SEQ ID NO: 857, and VIK.

[0502] In various illustrative embodiments, the Clec9A binding agent comprises an amino acid sequence selected from the following sequences:

R2CHCL8
(SEQ ID NO: 1059)
QVQLVESGGGLVHPGGSLRLSCAASGSISSINVMGWYRQAPGKERELVARI
TNLGLPNYADWLKDRFTISRDNAKNTVYLQMNSLKPEDTAVYYCYLVALSA
EYWGQGTQVTVSS;
R1CHCL50
(SEQ ID NO: 1060)
QVQLVESGGGLVHPGGSLRLSCAASGSFSSINVMGWYRQAPGKERELVARI
TNLGLPNYADSVTGRFTISRDNAKNTVYLQMNSLKPEDTAVYYCYLVALKA
EYWGQGTQVTVSS;
R1CHCL21
(SEQ ID NO: 1061)
QVQLVESGGGLVHRGGSLRLSCAASGSISSINIMGWYRQAPGKERELVARI
TNIGLPNYADSVKGRFTISRDNAKSTVYLQMNSLNAEDTAVYYCYLVALKA
EYWGQGTQVTVSS;
R2CHCL87
(SEQ ID NO: 1062)
QVQLVESGGGLVQPGGSLRLSCAASGSISSINVMGWYRQAPGKERELVARI
TNLGLPNYADSVEGRFTISRDKDENTVYLEMNTLKPEDTAVYYCYLVGLKA
EYWGQGTQVTVSS;
R2CHCL24
(SEQ ID NO: 1063)
QVQLVESGGGLVQPGGSLRLSCAASGSSDSINAMGWYRQAPGKERELVAAI
TSGGRVVYSDSVKGRGTISRDNAKNTVYLQIASLKPEDTAVYYCNVKTKSA
VLFGGMDYWGKGTQVTVSS;
R2CHCL38
(SEQ ID NO: 1064)
QVQLVESGGGLVQPGGSLRLSCAASVSIFSINAMGWYRQAPGKERELVAAI
TSGGRTAYADSVKGRFTISRDNSKNTVYLQMDSLKPEDTDVYYCKAYIRGE
DYWGKGTQVTVSS;
R1CHCL16
(SEQ ID NO: 1065)
DVQLVESGGGLVQPGGSLRLSCAASGSIFSLNAMGWYRQAPGKERELVAHI
TSDGRIVYADPVKGRFTISRVDGKNMVTLQMNSLKPEDTAVYYCNAKHYAS
NYWGQGTQVTVSS;
R2CHCL10
(SEQ ID NO: 1066)
QVQLVESGGGSVQAGGSLRLSCAASGRTISNYDMAWSRQAPGKEREFVARI
SGSGDRTDYADSVKGRFTISRDNAKNTVYLQMNSLKPEDTAIYYCQIQDFG
SPSFSGQGTQVTVSS;
R1CHCL34
(SEQ ID NO: 1067)
DVQLVESGGGSVQAGGSLRLSCAASGRTISNYDMAWSRQAPGKEREFVARI
SGSGDRTDYADSVKGRFTISRDNAKNTVYLQMNSLKPEDTAIYYCQIQDFR
SPDFWSQGTQVTVSS;
R1CHCL82
(SEQ ID NO: 1068)
QVQLVESGGESVQAGGSLRLSCAASGRTISNYDMAWSRQAPGKEREFVARI
SGSGDRTDYADSVKGRFTISRDNAKNTVYLQMNSLKPEDTAIYNCQTQIFG
SPNFSGQGTQVTVSS;
R2CHCL3
(SEQ ID NO: 1069)
QVQLVESGGGLVQAGDSLRLSCAASGRTFTTSLMQWHRQAPGKEREFVASI
TWSTGNTHYADSVKGRFTISRDNARNTVYLQMNSLKPEDTAIYTCRVLAIH
GDYWGQGTQVTVSS;
R2CHCL69
(SEQ ID NO: 1070)
DVQLVESGGGLVQAGDSLRLSCAASERNLRIYDMAWYRQAPGKEREYVAVI
SSSGDSTHYSDFVKGRFTISRDNAKNTVSLQMDSLKPEDTAFYYCNVNQIR
QWPWGQGTQVTVSS;
R1CHCL56
(SEQ ID NO: 1071)
QVQLVESGGGLVQAGDSLRLSCAASERNLRIYDMAWYRQAPGKEREYVAVI
SSSGDSTHYSDFVKGRFTISRDNAKNTVSLQMDSLKPEDTAFYYCNVNSIR
QWPWGQGTQVTVSS;
R2CHCL32
(SEQ ID NO: 1072)
QVQLVESGGGLVQAGDSLRLSCTASERNLRSYDMAWWRQAPGKEREYVAVI
TSSGDSTHYSDFVKGRFTISRDNAKNTVSLQMDSLKPEDTASYYCNVNAIR
QWPWGQGTQVTVSS;
R2CHCL49
(SEQ ID NO: 1073)
DVQLVESGGGSVQAGGSLRLSCAISGLTFSNYHMGWYRQAPGREREFVAQI
TWSDASIYYAGSVKGRFTISRDNVKNIVYLQIDNLKPEDTAIYYCDARKVG
GPDYWGQGTQVTVSS;
R2CHCL53
(SEQ ID NO: 1074)
QVQLVESGGGLVQAGGSLTLSCAISGLTFSSYHMGWYRQAPGREREFVAQI
TWSDTSIYYAGSVKGRFTISRDNVKNIVYLQIDNLKPEDTAIYYCDARKVG
GPDYWGQGTQVTVSS;
R2CHCL22
(SEQ ID NO: 1075)
DVQLVESGGGLVQAGGSLRLSCAISGLTFSRYHMGWYRQAPGREREFVAQI
TWSDGTTYYPGSVKGRFTISRDNARNTVYLQIDNLKPEDTAIYYCDARKVG
GPDYWGQGTQVTVSS;
R2CHCL25
(SEQ ID NO: 1076)
QVQLVESGGGLVQAGGSLRLSCATSGLTLSSYYIAWYRQAPGREREFVAQI
RWSDDSTYYPGSVKGRFTISRDNARNTVYLRMDNLKPEDTARYYCDARKVG
GPDYWGQGTQVTVSS;
R2CHCL18
(SEQ ID NO: 1077)
DVQLVESGGGLVQAGGSLRLSCATSGLTFSSYYTGWYRQAPGREREFVAQI
SWSDDSTYYADSVKGRFTISRDNARNTVYLQMNNLKPGDTAIYYCDARKVG
GPDYWGQGTQVTVSS;
R1CHCL23
(SEQ ID NO: 1078)
DVQLVESGGGLVQAGGSLRLSCATSGLTLSSYHMGWYRQAPGREREFVAQI
SWSDDSTYYADSVKGRFTISRDNARNTVYLQMNNLKPEDTAIYYCDARKVG
GPDYWGQGTQVTVSS;
R1CHCL27
(SEQ ID NO: 1079)
DVQLVESGGGLVQAGGSLRLSCAASGRTSSPYVTGWYRQTPGKEREPVATV
SWGGVTYYADSVKGRFTISRDNAKNTVYLQMNALKPEDTAIYYCNVNTFGN
VYWGQGTQVTVSS;
R2CHCL13
(SEQ ID NO: 1080)
QVQLVESGGGLVQPGGSLRLSCAASGFTFSGYVMSWVRQAPGKGLEWVASI
GSGGGYPSYTDSVEGRFTISRDNAKNTLYLLMDNLKPDDTAVYYCEMLGRR
GQGTQVTVSS;
R2CHCL14
(SEQ ID NO: 1081)
QVQLVESGGGLVQPGGSLRLSCAASGFTFSGYVMSWVRQAPGKGLEWVASI
GSGGGYPSYTDSVEGRFTISRDNAKNTLYLQMNNLKPDDTAVYYCEMLGRR
GQGTQVTVSS;
R2CHCL42
(SEQ ID NO: 1082)
QVQLVESGGGLVQPGGSLRLSCAASGFTFSGYVMSWVRQAPGKGLEWVASI
GSGGGYPSYTGSVEGRFTISRDNAKNTLYLLMNNLKPDDTAVYYCEMLGRR
GQGTQVTVSS;
R2CHCL41
(SEQ ID NO: 1083)
QVQLVESGGGLVQPGGSLRLSCAASGFTFSGYVMSWVRQAPGKGLEWVAHI
GSGGGYPSYTDSVQGRFTISRDNAKNTLYLQMNNLKPEDTAVYYCEMLGRR
GQGTQVTVSS;
R2CHCL94
(SEQ ID NO: 1084)
QVQLVESGGGLVQPGGSLRLSCAASGFTFSGYVMTWVRQAPGKGLEWVAHI
GSGGGHATYTDSVEGRFTISRDNAKNTLYLQMNNLKAEDTAVYYCEFLGRR
GQGTQVTVSS;
or
R2CHCL27
(SEQ ID NO: 1085)
QVQLVESGGGLVQPGGSLRLSCAASGFTFSGYLMSWVRQAPGKGLEWVATI
GSGGGITSYADSVKGRFTISRDNAKNTLYLQMNNLKHEDTAVYYCETVIKR
GQGTQVTVSS.

[0503] In various illustrative embodiments, the Clec9A targeting moiety comprises an amino acid sequence selected from the following sequences:

1LEC 7
(SEQ ID NO: 1086)
QVQLQESGGGLVQPGGSLRLSCAASGRISSINSMGWYRQAPGNQRELVAAITNGGAKTYADSVKGRFTISTDNA
GNTVYLQMDSLRPEDTAVYYCKAFTRRDDYWGQGTQITVSSAAAYPYDVPDYGSHHHHHH
or
1LEC 9
(SEQ ID NO: 1087)
QVQLQESGGGLVQAGGSLRLSCAASGSITSINAMGWYRQAPGKQRELVAAITSGGRLSYADSVKGRFTISRDNA
ESTVALQMNSLKPEDTAVYSCAAFQSSGIDWGQGTQVTVSSAAAYPYDVPDYGSHHHHHH
or
1LEC 26
(SEQ ID NO: 1088)
QVQLQESGGGLVQPGGSLRLSCAASGRFFRVNAMGWYRQAPGKQRELVAAITNGGQTAYADSVKGRFTISKES
ARNTVHLQMSSLKPEDTAVYYCTIWAADYQQYWGQGTQVTVSSAAAYPYDVPDYGSHHHHHH
or
1LEC 27
(SEQ ID NO: 1089)
QVQLQESGGGLVQAGESLRLSCAASGSSDSINAMGWYRQAPGKQRELVAAITSGGRSTYIDSAKGRATISRDNA
RNTAYLQMSSLKAEDTAVYYCTIWNRDRQQYWGQGTQVTVSSAAAYPYDVPDYGSHHHHHH
or
1LEC 28
(SEQ ID NO: 1090)
QVQLQESGGGLVQSGGSLRLSCAASGSVFSINAWGWYRQAPGKQRELVAAITNQGRIAYAPSVNGRFTISRDS
AKNTVYLQMNSLKPEDTAVYYCNAKPTPVYGSTVGDYWGQGTQVTVSSAAAYPYDVPDYGSHHHHHH
or
1LEC 30
(SEQ ID NO: 1091)
QVQLQESGGGLVQAGGSLRLSCAASGSILSINSMGWYRPALGNQRELVAAITNDGRTTYVDSVKGRFTISRDNA
KNTVYLQMNSLKPEDTAVYWCKAFTRDKDYWGQGTQVTVSSAAAYPYDVPDYGSHHHHHH
or
1LEC 38
(SEQ ID NO: 1092)
QVQLQESGGGLVQTGGSLRLSCAASVSISSINSMGWYRQAPGKERELVAAVTVGGRYAYADSAKNRFTISRDD
AQNTVHLQMSSLRAEDTAVYYCTIWDRDRQQYWGXGTQVTVSSAAAYPYDVPDYGSHHHHHH
or
1LEC 42
(SEQ ID NO: 1093)
QVQLQESGGGLVQPGGSLRLSCAASGRVFSINAMGWYRQAPGKQRELVAAITNQGATTYADSVKGRFTISRDT
AGNTVYLQMNSLRPEDTAVHYCKAFTRTDDYWGQGTQVTVSSAAAYPYDVPDYGSHHHHHH
or
1LEC 51
(SEQ ID NO: 1094)
QVQLQESGGGLVQAGGSLRLSCAASVNIDTLNSMAWYRQAPGKQRELVAGITGSGQITYANSVRGRFTVSRDN
AKSTVYLQMNTLQPEDTAVYYCAAYDRSSTPYWGQGTQVTVSSAAAYPYDVPDYGSHHHHHH
or
1LEC 61
(SEQ ID NO: 1095)
QVQLQESGGGLVQPGGSLRLSCAASGGISSINSMGWYRQAPGNQRELVAAITNGGRTVYGDSVKGRFTISRDS
AGNTVHLQMDSLRPEDTGVYYCKAFTRGDDYWGQGTQVTVSSAAAYPYDVPDYGSHHHHHH
or
1LEC 62
(SEQ ID NO: 1096)
QVQLQESGGGLVQPGGFLSLSCAASGSMHSVNSMAWYRQVPGKQRELVAAITSGGRLAYAPSVNGRFTISRDY
AKNTIHLQMNSLEPEDTAVYYCAALNSATTYWGQGTQVTVSSAAAYPYDVPDYGSHHHHHH
or
1LEC 63
(SEQ ID NO: 1097)
QVQLQESGGGLVQAGGSLRLSCAATGDISSINAMGWHRPARGNERELVAAITNGGRTTYVDSVKGRFTISRDNA
KNTVYLQMNSLKPEDTAVYFCKAYTRDEDYWGQGTQVTVSSAAAYPYDVPDYGSHHHHHH
or
1LEC 64
(SEQ ID NO: 1098)
QVQLQESGGGLVRAGGSLRLSCAASGSIFSIDAMGWYRPAHGEQRELVAAITTGGRTTYVDSVKGRFTISRDNA
KNTVYLQMNSLKPEDTAVYFCKAFTRDEDYWGQGTQVTVSSAAAYPYDVPDYGSHHHHHH
or
1LEC 70
(SEQ ID NO: 1099)
QVQLQESGGGLVQPGGSLRLSCAASGSIFSINAMGWYRQAPGKQRELVAAITNQGRLTYADSVKGRFTISRDNA
KNTVFLQMDSLKPEDTAVYYCNAKWYDPLVIEYYDNWGQGTQVTVSSAAAYPYDVPDYGSHHHHHH
or
1LEC 84
(SEQ ID NO: 1100)
QVQLQESGGGLVQPGGSLRLSCAASGSIFSIAAMGWYRQAPGKQRELVAAITSGGRRAYADSVKGRFTISRDND
ENTVALQMNSLKPEDTDVYYCNAKADHNDYWGQGTQITVSSAAAYPYDVPDYGSHHHHHH
or
1LEC 88
(SEQ ID NO: 1101)
QVQLQESGGGLVQPGGSLRLSCAAIGNIASITAMGWYRQAPGKQRELVAAITSASASRTTYADSVKGRFTISRDN
AKNTVYLQMNSLQPEDTAVYYCKGFRSGADDYWGQGTQVTVSSAAAYPYDVPDYGSHHHHHH
or
1LEC 91
(SEQ ID NO: 1102)
QVQLQESGGGLVQPGGSLRLSCAASGFTFDDYAIGWFRQAPGKEHEGVSCISRSDGSTYYDDSVKGRFTISSD
NAKNTVYLQMNSLKPEDTAVYYCAAEVPSTYSCSGFREDYKGKGTQVTVSSAAAYPYDVPDYGSHHHHHH
or
1LEC 92
(SEQ ID NO: 1103)
QVQLQESGGGLVQPGGSLRLSCAASGSISSINAMGWYRQAPGNQRELVAAITNQGRVTYADSVKGRFTISRDG
AKNTVYLQMNSLKPEDTAVYYCKVFAASGMEYWGKGTQVTVSSAAAYPYDVPDYGSHHHHHH
or
1LEC 94
(SEQ ID NO: 1104)
QVQLQESGGGLVQAGESLRLSCAASVSIFRSYFMGWYRQAPGKQRELVAAITDGGRLAYADSAKGRFTISREDT
RNTVHLQMSSLKAEDTAVYYCTIWTTDRQQYWGQGTQVTVSSAAAYPYDVPDYGSHHHHHH
or
2LEC 6
(SEQ ID NO: 1105)
QVQLQESGGGWVQPGGSLRLSCAATGSIVSINAIGWYRQAPGKQRELVASITNQGIRNYSTSVMGRFTISRDDV
KNTVSLQMNSLKPEDSAVYYCKGFAGWGKEDYWGQGTQVTVSSAAAYPYDVPDYGSHHHHHH
or
2LEC 13
(SEQ ID NO: 1106)
QVQLQESGGGLVQAGASLRLSCAASGSIFSINAMGWYRQAPGKQRELVAAITNQGRTTYADSVKGRFTISRDNA
KNTVYLQMDSLEPEDTAIYYCKGFSPTGDYWGQGTQVTVSSAAAYPYDVPDYGSHHHHHH
or
2LEC 16
(SEQ ID NO: 1107)
QVQLQESGGGLVQPGGSLRLSCLASRSFSSFNAMGWYRQAPGKERELVAAITNGGRIAYGIAVNGRFTISRDNA
KNTVYLQMNSLKPEDTAVYYCNAKPTPVYGSTVGDYWGQGTQVTVSSAAAYPYDVPDYGSHHHHHH
or
2LEC 20
(SEQ ID NO: 1108)
QVQLQESGGGLVQAGGSLTLSCAASGSFSSINAMGYYRQAPGKQRELVAAITNGGRIAYSDSAKGRFTISRDSA
KNTMYLQMNSLKPEDTDVYYCNAKASPVYGSTVEDYWGQGTQVTVSSAAAYPYDVPDYGSHHHHHH
or
2LEC 23
(SEQ ID NO: 1109)
QVQLQESGGGLVQPGGSLRLSCAASGTSFSINGMAWYRQAPGGQRELVGGITSDGSTGYADSVKGRFTVSRD
NAKNTVYLQMNRLKPEDTAVYYCGTSTPRGDSYWGQGTQVTVSSAAAYPYDVPDYGSHHHHHH
or
2LEC 24
(SEQ ID NO: 1110)
QVQLQESGGGLVQAGGSLRLSCAASGRTFSTYAMGWFRQAPGKERGLVAAISWSGGSTYYADSVKGRFTIFRD
NAENTVYLQMNSLKPEDTAVYYCAAEAEGSGREGNFYERSWYQGQGTQVTVSSAAAYPYDVPDYGSHHHHHH
or
2LEC 26
(SEQ ID NO: 1111)
QVQLQESGGGLVETGGSLRLSCAASGSIFSINAMGWYRQAPGKQRELVAAITDQGRLAYADSAKGRFTISRENA
RNTLHLQMSSLKAEDTAVYYCTIWDRDRQQYWGQGTQVTVSSAAAYPYDVPDYGSHHHHHH
or
2LEC 38
(SEQ ID NO: 1112)
QVQLQESGGGLVQPGGSLRLSCAASGRIFDINAMGWYRQAPGKQRELVAAITNGGQTTYADSVKGRFTISRDN
AGNTVYLQMNSLRPEDTAVYYCKAFTRSDDYWGQGTQVTVSSAAAYPYDVPDYGSHHHHHH
or
2LEC 48
(SEQ ID NO: 1113)
QVQLQESGGGLVQAGGSLRLSCAASGTLFSINGMAWYRQAPGKRRELVGGITSDGSTGYADSVKGRFTISRDN
AKNTAYLQMNSLKPEDTAVYYCGTSTPRGDSYWGQGTQVTVSSAAAYPYDVPDYGSHHHHHH
or
2LEC 53
(SEQ ID NO: 1114)
QVQLQESGGGLVQAGGSLRLSCAASGSIDSINAMGWYRPALGEQRELVAAITTGGRTAYVDSVKGRFTISRDAA
KNTVYLQMNSLKPEDTAVYSCKAFTRDTDYWGQGTQVTVSSAAAYPYDVPDYGSHHHHHH
or
2LEC 54
(SEQ ID NO: 1115)
QVQLQESGGGLAQPGGSLQLSCAASGRAFSTNSMGWYRQASGKQRELVAAITSQGRITLADSVKGRFTISSDN
TKNTVFLQMNSLKPEDTAVYYCNAWTTLGTFGGQGTQVTVSSAAAYPYDVPDYGSHHHHHH
or
2LEC 55
(SEQ ID NO: 1116)
QVQLQESGGGLVQTGESLSLSCAVASGSIISINSMGWYRQAPEKQRELVAAITVDGRLAYADSAKHRFTISKESA
RNTVHLHMSSLKPEDTAVYYCTIWVRDGQQYWGQGTQVTVSSAAAYPYDVPDYGSHHHHHH
or
2LEC 59
(SEQ ID NO: 1117)
QVQLQESGGGLVQPGGSLRLSCAVSRNFFSINAMGWYRQAPGKQRELVAAITNGGRIAYGTSVMGRFTISRDD
AKNTVDLQMNSLRPEDTAVYYCNAKAIPVYGSTVEDYWGQGTQVTVSSAAAYPYDVPDYGSHHHHHH
or
2LEC 60
(SEQ ID NO: 1118)
QVQLQESGGGLVQPGGSLRLSCAASGRFFRVNAMGWYRQVPGKQRELVAAITNGGQIAYADSVKGRFTISRDS
AKNTVYLQMNSLKSEDTDVYYCNAKAAATHLSTVADYWGQGTQVTVSSAAAYPYDVPDYGSHHHHHH
or
2LEC 61
(SEQ ID NO: 1119)
QVQLQESGGGLVQPGGSLRLSCAASGSIVSINSMGWYRQAPGKQRELVAAITDQGRTTYADSVKGRFTISRDDA
KNKNTVYLQMNSLKAEDTAVYACKAFGRFDDYWGQGTQVTVSSAAAYPYDVPDYGSHHHHHH
or
2LEC 62
(SEQ ID NO: 1120)
QVQLQESGGGLVQPGGSLRLSCAAYGSIFSINAMGWYRQAPGKERELVAGITTQGRITYGNSVRGRFTISGDNA
KNTVYLQMKSLKPEDTAVYYCSAWGVKTGPESGSGTLEGQGTQVTVSSAAAYPYDVPDYGSHHHHHH
or
2LEC 63
(SEQ ID NO: 1121)
QVQLQESGGGLVQAGGSLRLSCAASGSIIGINSMGYYRTAPGKQRELVAAITSGGRTTYVDSVKGRFTISRDNAK
NTVYLQMNSLKPEDTAVYFCKAFTRDEDYWGQGTQVTVSSAAAYPYDVPDYGSHHHHHH
or
2LEC 67
(SEQ ID NO: 1122)
QVQLQESGGGLVQAGGSLRLSCAASGRTFPGYVMAWFRQSPGQEREFAAAINWRGGDTYYADSVKGRFTISR
DNVKNTVFLQMNSLKPEDTAVYFCAARLTTEYDYAYWGQGTQVTVSSAAAYPYDVPDYGSHHHHHH
or
2LEC 68
(SEQ ID NO: 1123)
QVQLQESGGGLVQPGESLRLSCAASGSIFSINAMGWYRQAPGKQRELVAAITDGGAKTYADSVKGRFTISTDNA
GNTVYLQMDSLRPEDTAVYYCKAFTRGNDYWGQGTQVTVSSAAAYPYDVPDYGSHHHHHH
or
2LEC 76
(SEQ ID NO: 1124)
QVQLQESGGGLVQAGESLRLSCVVSGRTFSINAMGWYRQAPGKQRELVAAITNQGRLSYVDSVKGRFTISRDN
AANTVYLQMNSLKPEDTAVYYCAAFQSSGIDWGQGTQVTVSSAAAYPYDVPDYGSHHHHHH
or
2LEC 83
(SEQ ID NO: 1125)
QVQLQESGGGLVQAGGSLRLSCAASGRTLSSYTIGWYRQAPGKQRELVAAITNQGRRTYADSVKGRFTISRDN
AKNTVYLQMDSLKSEDTAVYYCKGFSPTDDFWGQGTQVTVSSAAAYPYDVPDYGSHHHHHH
or
2LEC 88
(SEQ ID NO: 1126)
QVQLQESGGGLVQPGGSLRLSCTASGSFFSINAMGWYRQAPGNQRELVAAITNGGRIAYTDSVKGRFTISNDNA
KNTVYLQMNSLKPEDTDVYYCNAKAIPIYGSTAEDYWGQGTQVTVSSAAAYPYDVPDYGSHHHHHH
or
2LEC 89
(SEQ ID NO: 1127)
QVQLQESGGGLVQAGGSLRLSCAASGSIFSINSMGWYRQAPGKQRELVAAITNGGRTTYADSVKGRFTISRDNA
KNTVYLQMDSLKPEDTAVYYCKGFSLTDDYWGQGTQVTVSSAAAYPYDVPDYGSHHHHHH
or
2LEC 90
(SEQ ID NO: 1128)
QVQLQESGGGLVQTGGSLRLSCAASGSIFSFNAMGWYRQAPGKQRELVAAITDGGRLTYADSAKGRFTISRENT
RNTVHLQMSSLKAEDTADYYCTIWTRDRQQYWGQGTQVTVSSAAAYPYDVPDYGSHHHHHH
or
2LEC 93
(SEQ ID NO: 1129)
QVQLQESGGGLVQAGGSLRLSCAASGSIFSINAMGWYRPALGEQRELVAAITTGGRTTYVDSVKGRFSISRDNA
KNTVYLQMNSLKPEDTAVYFCKAFTRDEDFWGQGTQVTVSSAAAYPYDVPDYGSHHHHHH
or
2LEC 95
(SEQ ID NO: 1130)
QVQLQESGGGLVQAGGSLRLSCEASGRTFSTYAMAWFRQAPGKERDLVAAISWSGGSTEYHDSVKGRFTISRD
NTKNTVYLQMNSLKAEDTAVYYCAAEVEGSGREGNFYGASWYPGQGTQVTVSSAAAYPYDVPDYGSHHHHHH
or
3LEC 4
(SEQ ID NO: 1131)
QVQLQESGGGLVQPGGSLRLSCAASGSFFSINAMGWYRQAPGKQRELVAAITNQGRIAYADSVKGRFTISRDNA
KNTVYLQMNSLKPEDTAVYYCGRPGWDYWGQGTQVTVSSAAAYPYDVPDYGSHHHHHH
or
3LEC 6
(SEQ ID NO: 1132)
QVQLQESGGGLVQAGGSLRLSCVASVNIGSLNSMVWYRQSPGKQRELVAGITGSGQITYANSVRGRFTVSRDIA
KSTAYLQMNTLKPEDTAVYYCAAYDRSATAYWGQGTQVTVSSAAAYPYDVPDYGSHHHHHH
or
3LEC 9
(SEQ ID NO: 1133)
QVQLQESGGGLVQAGGSLRVSCAASGRTLSNYAVGWWRQAPGKQREFVAAINWSSGGISYSNSAKGRFALSR
DNAKNTVYLQMDSLKPEDTAVYYCAAASSVLSGTVDYWGQGTQVTVSSAAAYPYDVPDYGSHHHHHH
or
3LEC 11
(SEQ ID NO: 1134)
QVQLQESGGGLVQPGGSLRLSCAASGSISSINAMGWYRQAPGKQRELVAAITGQGRTTYADSVKGRFTISRDG
AKNTVYLQMNSLKPEDTAVYYCKVFAADGMEYWGKGTQVTVSSAAAYPYDVPDYGSHHHHHH
or
3LEC 13
(SEQ ID NO: 1135)
QVQLQESGGGLVQPGGSLRLSCAASGRFFRVNAMGWYRQAPGKQRELVAAITNGGQIVYADSVKGRFTISRDS
AKNTVYLQMNSLKSEDTAVYYCNAKAAASYVSTVADYWGQGTQVTVSSAAAYPYDVPDYGSHHHHHH
or
3LEC 15
(SEQ ID NO: 1136)
QVQLQESGGGLVQAGGSLRLSCAASGSVFSINAMGWYRQAPEKQRELVAAITTQGRTTYEDSVKGRFTISRDG
AQNTVYLQMDSLKPEDTAVYYCKAWTAKDDYWGKGTQVTVSSAAAYPYDVPDYGSHHHHHH
or
3LEC 22
(SEQ ID NO: 1137)
QVQLQESGGGRVQPGGSLRLSCAAIGSIFEINSIGWYRQAPGKQRELVAAITSGGITNYANSVQGRSTISRDNVN
NTVYLQMNSLKPEDSAVYYCKGFTGWGKEDYWGQGTQVTVSSAAAYPYDVPDYGSHHHHHH
or
3LEC 23
(SEQ ID NO: 1138)
QVQLQESGGGLVQTGGSLRLSCAASGSIFNINSMGWYRQAPGKQRELVAAITVGGRLAYADSAKGRFTISKESA
RNTVHLQMSSLKPEDTAVYYCTIWAADYQQYWGQGTQVTVSSAAAYPYDVPDYGSHHHHHH
or
3LEC 27
(SEQ ID NO: 1139)
QVQLQESGGGLVQAGGSLRLSCAASVNIGTLNSMAWYREAPGKQRELVAGITGGGQITYANSVRGRFTVSRDIA
KSTAYLQMNTLKPEDTAVYYCAAYDRSATPYWGQGTQVTVSSAAAYPYDVPDYGSHHHHHH
or
3LEC 30
(SEQ ID NO: 1140)
QVQLQESGGGLVQTGGSLRLSCAASGSIFSINSMGWYRQAPGKQRELVAAITSQGRSTYADSAKGRFTISLGNA
RNTVNLQMSSLKTEDTAVYYCTIWARDRQQYWGQGTQVTVSSAAAYPYDVPDYGSHHHHHH
or
3LEC 36
(SEQ ID NO: 1141)
QVQLQESGGGLVQPGGSLRLSCAASGRIGSINSMGWYRQAPGKQREMVAAITNGGATVYADSVKGRFTISRDN
AGNTVDLHMNSLRPEDSAVYYCKAFTRGDDYWGQGTQVTVSSAAAYPYDVPDYGSHHHHHH
or
3LEC 55
(SEQ ID NO: 1142)
QVQLQESGGGLVQPGGSLKLSCAASGSIFSFNAMGWYRQAPGKQRELVAAITDGGRLTYADSAKNRFTISRENT
RNTVHLQMSSLKAEDTAVYYCTIWTKDRQQYWGQGTQVTVSSAAAYPYDVPDYGSHHHHHH
or
3LEC 57
(SEQ ID NO: 1143)
QVQLQESGGGLVQPGGSLRLSCAASGRISSINSMGWYRQAPGKQRELVAAITNGGAKTYADSVKGRFTISRDG
AGNTVYLQMDNLRPEDTAVYYCKAFTRTYDYWGQGTQVTVSSAAAYPYDVPDYGSHHHHHH
or
3LEC 61
(SEQ ID NO: 1144)
QVQLQESGGGLVQAGGSLRVSCAASGRTLSNYAVAWFRQAPGKQREFVAAINWSSGGISYSNAAKGRFALSR
DNAKNTVYLQMDSLKPEDTAVYYCAAASSILSGTVDYWGQGTQVTVSSAAAYPYDVPDYGSHHHHHH
or
3LEC 62
(SEQ ID NO: 1145)
QVQLQESGGGLVQPGGSLRLSCAASGRIGSINSMGWYRQAPGKQREMVAAITNGGATVYADSVKGRFTISRDN
AGNTVDLHMNSLRPEDSAVYYCTIWAADYQQYWGQGTQVTVSSAAAYPYDVPDYGSHHHHHH
or
3LEC 66
(SEQ ID NO: 1146)
QVQLQESGGGLVQPGGSLRLSCAASRSFFSFNAMGWYRQAPGKQRELVAAITNGGRIAYGTSVMGRFTISRDN
AKNTVYLQMDSLKPEDTAVYYCNAKPAPVYGSTVGDYWGQGTQVTVSSAAAYPYDVPDYGSHHHHHH
or
3LEC 69
(SEQ ID NO: 1147)
QVQLQESGGGLVQPGGSPRLSCAASGRFFRVNAMGWYRQAPGKQRELVAAITNGGQTAYADSVKGRFTISRD
SAKNTVYLQMNSLKSEDTAVYYCKVFAADGMEYWGKGTQVTVSSAAAYPYDVPDYGSHHHHHH
or
3LEC 76
(SEQ ID NO: 1148)
QVQLQESGGGLVQPGESLRLSCAASGIIFSINAMGWYRQAPGKQRELVAAITNXGRTTYADSVKGRFTISRDNAK
NTVTLQMNSLKPEDTAVYYCNAFGSGGGVGQGTQVTVSSAAAYPYDVPDYGSHHHHHH
or
3LEC 82
(SEQ ID NO: 1149)
QVQLQESGGGLVQAGGSLRLSCAASGRTLSNYAVAWFRQAPGKQRELVAAIWWASGGISYANSAKGRFVLSR
DNAKNTVYLQMDSLKPEDTAVYYCAAASSVLSGTADYWGQGTQVTVSSAAAYPYDVPDYGSHHHHHH
or
3LEC 89
(SEQ ID NO: 1150)
QVQLQESGGGLVQPGGSLRLSCAASGRIFSVNAMGWYRQAPGKQRELVAAITNQGAPTYADSVKGRFTISRDN
AGNTVYLQMNSLRPEDTAVYYCKAFTRGDDYWGQGTQVTVSSAAAYPYDVPDYGSHHHHHH
or
3LEC 94
(SEQ ID NO: 1151)
QVQLQESGGGSVQAGGSLRLSCAASGRTFSSYAMAWFRQAPGMERELVAAISWSGGSTYYADSVKGRFTISR
DNAENTVYLQMNSLKPEDTAVYYCAAEAEGSGREGNFYERSWYQGQGTQVTVSSAAAYPYDVPDYGSHHHHHH.

[0504] In various illustrative embodiments, the Clec9A targeting moiety comprises an amino acid sequence selected from any one of the sequences provided above without the terminal histidine tag sequence (i.e., HHHHHH; SEQ ID NO: 327).

[0505] In some embodiments, the Clec9A targeting moiety comprises an amino acid sequence selected from SEQ ID Nos: 1086-1151 (provided above) without the HA tag (i.e., YPYDVPDYGS; SEQ ID NO:328).

[0506] In some embodiments, the Clec9A targeting moiety comprises an amino acid sequence selected from SEQ ID Nos: 1086-1151 (provided above) without the AAA linker (i.e., AAA).

[0507] In some embodiments, the Clec9A targeting moiety comprises an amino acid sequence selected from SEQ ID Nos: 1086-1151 (provided above) without the AAA linker, HA tag, and terminal histidine tag sequence (i.e., AAAYPYDVPDYGSHHHHHH; SEQ ID NO: 329).

[0508] In various illustrative embodiments, the Clec9A targeting moiety comprises an amino acid sequence selected from the following sequences:

R1CHCL50:
(SEQ ID NO: 1152)
QVQLVESGGGLVHPGGSLRLSCAASGSFSSINVMGWYRQAPGKERELVAR
ITNLGLPNYADSVTGRFTISRDNAKNTVYLQMNSLKPEDTAVYYCYLVAL
KAEYWGQGTQVTVSS;
R1CHCL50_opt1 (E1D-A74S-K83R-Q108L):
(SEQ ID NO: 1153)
DVQLVESGGGLVHPGGSLRLSCAASGSFSSINVMGWYRQAPGKERELVAR
ITNLGLPNYADSVTGRFTISRDNSKNTVYLQMNSLRPEDTAVYYCYLVAL
KAEYWGQGTLVTVSS;
R1CHCL50_opt2 (E1D-A74S-K83R-Q108L-H13Q):
(SEQ ID NO: 1154)
DVQLVESGGGLVQPGGSLRLSCAASGSFSSINVMGWYRQAPGKERELVAR
ITNLGLPNYADSVTGRFTISRDNSKNTVYLQMNSLRPEDTAVYYCYLVAL
KAEYWGQGTLVTVSS;
R1CHCL50_opt3 (E1D-A74S-K83R-Q108L-T64K):
(SEQ ID NO: 1155)
DVQLVESGGGLVHPGGSLRLSCAASGSFSSINVMGWYRQAPGKERELVAR
ITNLGLPNYADSVKGRFTISRDNSKNTVYLQMNSLRPEDTAVYYCYLVAL
KAEYWGQGTLVTVSS;
R1CHCL50_opt4 (E1D-A74S-K83R-Q108L-H13Q-T64K):
(SEQ ID NO: 1156)
DVQLVESGGGLVQPGGSLRLSCAASGSFSSINVMGWYRQAPGKERELVAR
ITNLGLPNYADSVKGRFTISRDNSKNTVYLQMNSLRPEDTAVYYCYLVAL
KAEYWGQGTLVTVSS;
3LEC_89:
(SEQ ID NO: 1157)
QVQLQESGGGLVQPGGSLRLSCAASGRIFSVNAMGWYRQAPGKQRELVAA
ITNQGAPTYADSVKGRFTISRDNAGNTVYLQMNSLRPEDTAVYYCKAFTR
GDDYWGQGTQVTVSS;
3LEC_89_opt1 (E1D-Q5V-Q108L):
(SEQ ID NO: 1158)
DVQLVESGGGLVQPGGSLRLSCAASGRIFSVNAMGWYRQAPGKQRELVAA
ITNQGAPTYADSVKGRFTISRDNAGNTVYLQMNSLRPEDTAVYYCKAFTR
GDDYWGQGTLVTVSS;
3LEC_89_opt2 (E1D-Q5V-Q108L-A74S):
(SEQ ID NO: 1159)
DVQLVESGGGLVQPGGSLRLSCAASGRIFSVNAMGWYRQAPGKQRELVAA
ITNQGAPTYADSVKGRFTISRDNSGNTVYLQMNSLRPEDTAVYYCKAFTR
GDDYWGQGTLVTVSS;
3LEC_89_opt3 (E1D-Q5V-Q108L-G75K):
(SEQ ID NO: 1160)
DVQLVESGGGLVQPGGSLRLSCAASGRIFSVNAMGWYRQAPGKQRELVAA
ITNQGAPTYADSVKGRFTISRDNAKNTVYLQMNSLRPEDTAVYYCKAFTR
GDDYWGQGTLVTVSS;
and
3LEC_89_opt4 (E1D-Q5V-Q108L-A74S-G75K):
(SEQ ID NO: 1161)
DVQLVESGGGLVQPGGSLRLSCAASGRIFSVNAMGWYRQAPGKQRELVAA
ITNQGAPTYADSVKGRFTISRDNSKNTVYLQMNSLRPEDTAVYYCKAFTR
GDDYWGQGTLVTVSS.

[0509] In an embodiment, the Clec9A targeting moiety comprises the anti-Clec9A antibody as disclosed in Tullett et al., JCI Insight. 2016; 1 (7): e87102, the entire disclosures of which are hereby incorporated by reference.

[0510] In various embodiments, the present invention contemplates the use of any natural or synthetic analogs, mutants, variants, alleles, homologs and orthologs (herein collectively referred to as “analogs”) of the Clec9A targeting moiety of the invention as described herein. In various embodiments, the amino acid sequence of the Clec9A targeting moiety further includes an amino acid analog, an amino acid derivative, or other non-classical amino acids.

[0511] In various embodiments, the Clec9A targeting moiety comprises a sequence that is at least 60% identical to any one of the Clec9A sequences disclosed herein. For example, the Clec9A targeting moiety may comprise a targeting moiety comprising a sequence that is at least about 60%, at least about 61%, at least about 62%, at least about 63%, at least about 64%, at least about 65%, at least about 66%, at least about 67%, at least about 68%, at least about 69%, at least about 70%, at least about 71%, at least about 72%, at least about 73%, at least about 74%, at least about 75%, at least about 76%, at least about 77%, at least about 78%, at least about 79%, at least about 80%, at least about 81%, at least about 82%, at least about 83%, at least about 84%, at least about 85%, at least about 86%, at least about 87%, at least about 88%, at least about 89%, at least about 90%, at least about 91%, at least about 92%, at least about 93%, at least about 94%, at least about 95%, at least about 96%, at least about 97%, at least about 98%, at least about 99%, or 100% identical to any of the sequences disclosed herein (e.g. about 60%, or about 61%, or about 62%, or about 63%, or about 64%, or about 65%, or about 66%, or about 67%, or about 68%, or about 69%, or about 70%, or about 71%, or about 72%, or about 73%, or about 74%, or about 75%, or about 76%, or about 77%, or about 78%, or about 79%, or about 80%, or about 81%, or about 82%, or about 83%, or about 84%, or about 85%, or about 86%, or about 87%, or about 88%, or about 89%, or about 90%, or about 91%, or about 92%, or about 93%, or about 94%, or about 95%, or about 96%, or about 97%, or about 98%, about 99% or about 100% sequence identity to any one of the sequences disclosed herein).

[0512] In various embodiments, the Clec9A targeting moiety comprises an amino acid sequence having one or more amino acid mutations with respect to any one of the sequences disclosed herein. In various embodiments, the Clec9A targeting moiety comprises an amino acid sequence having one, or two, or three, or four, or five, or six, or seen, or eight, or nine, or ten, or fifteen, or twenty amino acid mutations with respect to any one of the sequences disclosed herein. In some embodiments, the one or more amino acid mutations may be independently selected from substitutions, insertions, deletions, and truncations.

[0513] In some embodiments, the amino acid mutations are amino acid substitutions, and may include conservative and/or non-conservative substitutions.

[0514] “Conservative substitutions” may be made, for instance, on the basis of similarity in polarity, charge, size, solubility, hydrophobicity, hydrophilicity, and/or the amphipathic nature of the amino acid residues involved. The 20 naturally occurring amino acids can be grouped into the following six standard amino acid groups: (1) hydrophobic: Met, Ala, Val, Leu, Ile; (2) neutral hydrophilic: Cys, Ser, Thr; Asn, Gln; (3) acidic: Asp, Glu; (4) basic: His, Lys, Arg; (5) residues that influence chain orientation: Gly, Pro; and (6) aromatic: Trp, Tyr, Phe.

[0515] As used herein, “conservative substitutions” are defined as exchanges of an amino acid by another amino acid listed within the same group of the six standard amino acid groups shown above. For example, the exchange of Asp by Glu retains one negative charge in the so modified polypeptide. In addition, glycine and proline may be substituted for one another based on their ability to disrupt a-helices.

[0516] As used herein, “non-conservative substitutions” are defined as exchanges of an amino acid by another amino acid listed in a different group of the six standard amino acid groups (1) to (6) shown above.

[0517] In various embodiments, the substitutions may also include non-classical amino acids. Illustrative non-classical amino acids include, but are not limited to, selenocysteine, pyrrolysine, N-formylmethionine β-alanine, GABA and δ-Aminolevulinic acid, 4-aminobenzoic acid (PABA), D-isomers of the common amino acids, 2,4-diaminobutyric acid, α-amino isobutyric acid, 4-aminobutyric acid, Abu, 2-amino butyric acid, γ-Abu, ε-Ahx, 6-amino hexanoic acid, Aib, 2-amino isobutyric acid, 3-amino propionic acid, ornithine, norleucine, norvaline, hydroxyproline, sarcosme, citrulline, homocitrulline, cysteic acid, t-butylglycine, t-butylalanine, phenylglycine, cyclohexylalanine, β-alanine, fluoro-amino acids, designer amino acids such as β methyl amino acids, C α-methyl amino acids, N α-methyl amino acids, and amino acid analogs in general.

[0518] In various embodiments, the amino acid mutation may be in the CDRs of the targeting moiety (e.g., the CDR1, CDR2 or CDR3 regions). In another embodiment, amino acid alteration may be in the framework regions (FRs) of the targeting moiety (e.g., the FR1, FR2, FR3, or FR4 regions).

[0519] Modification of the amino acid sequences may be achieved using any known technique in the art e.g., site-directed mutagenesis or PCR based mutagenesis. Such techniques are described, for example, in Sambrook et al., Molecular Cloning: A Laboratory Manual, Cold Spring Harbor Press, Plainview, N.Y., 1989 and Ausubel et al., Current Protocols in Molecular Biology, John Wiley & Sons, New York, N.Y., 1989.

[0520] In various embodiments, the mutations do not substantially reduce the Clec9A targeting moiety's capability to specifically bind to Clec9A. In various embodiments, the mutations do not substantially reduce the Clec9A targeting moiety's capability to specifically bind to Clec9A and without functionally modulating (e.g., partially or fully neutralizing) Clec9A.

[0521] In various embodiments, the binding affinity of the Clec9A targeting moiety of the invention for the full-length and/or mature forms and/or isoforms and/or splice variants and/or fragments and/or monomeric and/or dimeric forms and/or any other naturally occurring or synthetic analogs, variants, or mutants (including monomeric and/or dimeric forms) of human Clec9A may be described by the equilibrium dissociation constant (K_{D}). In various embodiments, the Clec9A targeting moiety binds to the full-length and/or mature forms and/or isoforms and/or splice variants and/or fragments and/or any other naturally occurring or synthetic analogs, variants, or mutants (including monomeric and/or dimeric forms) of human Clec9A with a K_{D} of less than about 1 μM, about 900 nM, about 800 nM, about 700 nM, about 600 nM, about 500 nM, about 400 nM, about 300 nM, about 200 nM, about 100 nM, about 90 nM, about 80 nM, about 70 nM, about 60 nM, about 50 nM, about 40 nM, about 30 nM, about 20 nM, about 10 nM, or about 5 nM, or about 1 nM.

[0522] In various embodiments, the Clec9A targeting moiety binds but does not functionally modulate (e.g., partially or fully neutralize) the antigen of interest, i.e., Clec9A. For instance, in various embodiments, the Clec9A targeting moiety simply targets the antigen but does not substantially functionally modulate (e.g. partially or fully inhibit, reduce or neutralize) a biological effect that the antigen has. In various embodiments, the Clec9A targeting moiety binds an epitope that is physically separate from an antigen site that is important for its biological activity (e.g. an antigen's active site).

[0523] Such binding without significant function modulation finds use in various embodiments of the present invention, including methods in which the Clec9A targeting moiety is used to directly or indirectly recruit active immune cells to a site of need via an effector antigen. For example, in various embodiments, the Clec9A targeting moiety may be used to directly or indirectly recruit dendritic cells via Clec9A to a tumor cell in a method of reducing or eliminating a tumor (e.g., the Clec9A targeting moiety may comprise an anti-Clec9A antigen recognition domain and a targeting moiety having a recognition domain (e.g. antigen recognition domain) directed against a tumor antigen or receptor). In such embodiments, it is desirable to directly or indirectly recruit dendritic cells but not to functionally modulate or neutralize the Clec9A activity. In these embodiments, Clec9A signaling is an important piece of the tumor reducing or eliminating effect.

[0524] In some embodiments, the Clec9A targeting moiety enhances antigen-presentation by dendritic cells. For example, in various embodiments, the Clec9A targeting moiety directly or indirectly recruits dendritic cells via Clec9A to a tumor cell, where tumor antigens are subsequently endocytosed and presented on the dendritic cell for induction of potent humoral and cytotoxic T cell responses.

[0525] In other embodiments (for example, related to treating autoimmune or neurodegenerative disease), the Clec9A targeting moiety binds and neutralizes the antigen of interest, i.e., Clec9A. For instance, in various embodiments, the present methods may inhibit or reduce Clec9A signaling or expression, e.g. to cause a reduction in an immune response.

[0526] In various embodiments, the present multi-specific chimeric protein or chimeric protein complex has one or more targeting moieties directed against SIRP1α. In some embodiments, the SIRP1a targeting moiety comprises a recognition domain that recognizes one or more epitopes present on human SIRP1α. In an embodiment, the SIRP1a targeting moiety comprises a recognition domain that recognizes human SIRP1a with a signal peptide sequence. An illustrative human SIRP1a polypeptide with a signal peptide sequence is provided below:

(SEQ ID NO: 1)
MEPAGPAPGRLGPLLCLLLAASCAWSGVAGEEELQVIQPDKSVLVAAGET
ATLRCTATSLIPVGPIQWFRGAGPGRELIYNQKEGHFPRVTTVSDLTKRN
NMDFSIRIGNITPADAGTYYCVKFRKGSPDDVEFKSGAGTELSVRAKPSA
PVVSGPAARATPQHTVSFTCESHGFSPRDITLKWFKNGNELSDFQTNVDP
VGESVSYSIHSTAKVVLTREDVHSQVICEVAHVTLQGDPLRGTANLSETI
RVPPTLEVTQQPVRAENQVNVTCQVRKFYPQRLQLTWLENGNVSRTETAS
TVTENKDGTYNWMSWLLVNVSAHRDDVKLTCQVEHDGQPAVSKSHDLKVS
AHPKEQGSNTAAENTGSNERNIYIWGVVCTLLVALLMAALYLVRIRQKKA
QGSTSSTRLHEPEKNAREITQDTNDITYADLNLPKGKKPAPQAAEPNNHT
EYASIQTSPQPASEDTLTYADLDMVHLNRTPKQPAPKPEPSFSEYASVQV
PRK

[0527] In an embodiment, the SIRP1a targeting moiety comprises a recognition domain that recognizes human SIRP1a without a signal peptide sequence. An illustrative human SIRP1a polypeptide without a signal peptide sequence is provided below:

(SEQ ID NO: 2)
EEELQVIQPDKSVLVAAGETATLRCTATSLIPVGPIQWFRGAGPGRELIY
NQKEGHFPRVTTVSDLTKRNNMDFSIRIGNITPADAGTYYCVKFRKGSPD
DVEFKSGAGTELSVRAKPSAPVVSGPAARATPQHTVSFTCESHGFSPRDI
TLKWFKNGNELSDFQTNVDPVGESVSYSIHSTAKVVLTREDVHSQVICEV
AHVTLQGDPLRGTANLSETIRVPPTLEVTQQPVRAENQVNVTCQVRKFYP
QRLQLTWLENGNVSRTETASTVTENKDGTYNWMSWLLVNVSAHRDDVKLT
CQVEHDGQPAVSKSHDLKVSAHPKEQGSNTAAENTGSNERNIYIVVGVVC
TLLVALLMAALYLVRIRQKKAQGSTSSTRLHEPEKNAREITQDTNDITYA
DLNLPKGKKPAPQAAEPNNHTEYASIQTSPQPASEDTLTYADLDMVHLNR
TPKQPAPKPEPSFSEYASVQVPRK

[0528] In an embodiment, the SIRP1a targeting moiety comprises a recognition domain that recognizes a polypeptide encoding human SIRP1a isoform 2:

(SEQ ID NO: 3)
MEPAGPAPGRLGPLLCLLLAASCAWSGVAGEEELQVIQPDKSVLVAAGET
ATLRCTATSLIPVGPIQWFRGAGPGRELIYNQKEGHFPRVTTVSDLTKRN
NMDFSIRIGNITPADAGTYYCVKFRKGSPDDVEFKSGAGTELSVRAKPSA
PVVSGPAARATPQHTVSFTCESHGFSPRDITLKWFKNGNELSDFQTNVDP
VGESVSYSIHSTAKVVLTREDVHSQVICEVAHVTLQGDPLRGTANLSETI
RVPPTLEVTQQPVRAENQVNVTCQVRKFYPQRLQLTWLENGNVSRTETAS
TVTENKDGTYNWMSWLLVNVSAHRDDVKLTCQVEHDGQPAVSKSHDLKVS
AHPKEQGSNTAAENTGSNERNIYIVVGVVCTLLVALLMAALYLVRIRQKK
AQGSTSSTRLHEPEKNAREITQVQSLDTNDITYADLNLPKGKKPAPQAAE
PNNHTEYASIQTSPQPASEDTLTYADLDMVHLNRTPKQPAPKPEPSFSEY
ASVQVPRK

[0529] In an embodiment, the SIRP1a targeting moiety comprises a recognition domain that recognizes a polypeptide encoding human SIRP1a isoform 4:

(SEQ ID NO: 4)
MEPAGPAPGRLGPLLCLLLAASCAWSGVAGEEELQVIQPDKSVLVAAGET
ATLRCTATSLIPVGPIQWFRGAGPGRELIYNQKEGHFPRVTTVSDLTKRN
NMDFSIRIGNITPADAGTYYCVKFRKGSPDVEFKSGAGTELSVRAKPSAP
VVSGPAARATPQHTVSFTCESHGFSPRDITLKWFKNGNELSDFQTNVDPV
GESVSYSIHSTAKVVLTREDVHSQVICEVAHVTLQGDPLRGTANLSETIR
VPPTLEVTQQPVRAENQVNVTCQVRKFYPQRLQLTWLENGNVSRTETAST
VTENKDGTYNWMSWLLVNVSAHRDDVKLTCQVEHDGQPAVSKSHDLKVSA
HPKEQGSNTAAENTGSNERNIYIVVGVVCTLLVALLMAALYLVRIRQKKA
QGSTSSTRLHEPEKNAREITQDTNDITYADLNLPKGKKPAPQAAEPNNHT
EYASIQTSPQPASEDTLTYADLDMVHLNRTPKQPAPKPEPSFSEYASVQV
PRK

[0530] In various embodiments, the SIRP1a targeting moieties of the present invention may be any protein-based agent capable of specific binding, such as an antibody or derivatives thereof. In an embodiment, the targeting moiety comprises an antibody. In various embodiments, the antibody is a full-length multimeric protein that includes two heavy chains and two light chains. Each heavy chain includes one variable region (e.g., V_{H}) and at least three constant regions (e.g., CH₁, CH₂ and CH₃), and each light chain includes one variable region (V_{L}) and one constant region (C_{L}). The variable regions determine the specificity of the antibody. Each variable region comprises three hypervariable regions also known as complementarity determining regions (CDRs) flanked by four relatively conserved framework regions (FRs). The three CDRs, referred to as CDR1, CDR2, and CDR3, contribute to the antibody binding specificity. In some embodiments, the antibody is a chimeric antibody. In some embodiments, the antibody is a humanized antibody.

[0531] In some embodiments, the SIRP1a targeting moiety comprises antibody derivatives or formats. In some embodiments, the SIRP1a targeting moiety is a single-domain antibody, a recombinant heavy-chain-only antibody (VHH), a single-chain antibody (scFv), a shark heavy-chain-only antibody (VNAR), a microprotein (cysteine knot protein, knottin), a DARPin; a Tetranectin; an Affibody; a Transbody; an Anticalin; an AdNectin; an Affilin; a Microbody; a peptide aptamer; an alterase; a plastic antibodies; a phylomer; a stradobody; a maxibody; an evibody; a fynomer, an armadillo repeat protein, a Kunitz domain, an avimer, an atrimer, a probody, an immunobody, a triomab, a troybody; a pepbody; a vaccibody, a UniBody; Affimers, a DuoBody, a Fv, a Fab, a Fab′, a F(ab′)₂, a peptide mimetic molecule, or a synthetic molecule, as described in US Patent Nos. or Patent Publication Nos. U.S. Pat. No. 7,417,130, US 2004/132094, U.S. Pat. No. 5,831,012, US 2004/023334, U.S. Pat. Nos. 7,250,297, 6,818,418, US 2004/209243, U.S. Pat. Nos. 7,838,629, 7,186,524, 6,004,746, 5,475,096, US 2004/146938, US 2004/157209, U.S. Pat. Nos. 6,994,982, 6,794,144, US 2010/239633, U.S. Pat. No. 7,803,907, US 2010/119446, and/or U.S. Pat. No. 7,166,697, the contents of which are hereby incorporated by reference in their entireties. See also, Storz MAbs. 2011 May-Jun; 3 (3): 310-317.

[0532] In one embodiment, the SIRP1a targeting moiety comprises a single-domain antibody, such as VHH from, for example, an organism that produces VHH antibody such as a camelid, a shark, or a designed VHH. VHHs are antibody-derived therapeutic proteins that contain the unique structural and functional properties of naturally-occurring heavy-chain antibodies. VHH technology is based on fully functional antibodies from camelids that lack light chains. These heavy-chain antibodies contain a single variable domain (VHH) and two constant domains (CH₂ and CH₃).

[0533] In an embodiment, the SIRP1a targeting moiety comprises a VHH. In some embodiments, the VHH is a humanized VHH or camelized VHH.

[0534] In some embodiments, the VHH comprises a fully human V_{H} domain, e.g. a HUMABODY (Crescendo Biologics, Cambridge, UK). In some embodiments, fully human V_{H} domain, e.g. a HUMABODY is monovalent, bivalent, or trivalent. In some embodiments, the fully human V_{H} domain, e.g. a HUMABODY is mono- or multi-specific such as monospecific, bispecific, or trispecific. Illustrative fully human V_{H} domains, e.g. a HUMABODIES are described in, for example, WO 2016/113555 and WO2016/113557, the entire disclosure of which is incorporated by reference.

[0535] For example, in some embodiments, the SIRP1a targeting moiety of the present invention comprises one or more antibodies, antibody derivatives or formats, peptides or polypeptides, VHHs, or fusion proteins that selectively bind SIRP1α. In some embodiments, the SIRP1a targeting moiety is an antibody or derivative thereof that specifically binds to SIRP1α. In some embodiments, the chimeric protein or chimeric protein complex comprises a targeting moiety which is a camelid heavy chain antibody (VHH) that specifically binds to SIRP1α.

[0536] In some embodiments, the chimeric protein or chimeric protein complex comprises a targeting moiety that is a VHH comprising a single amino acid chain having four “framework regions” or FRs and three “complementary determining regions” or CDRs. As used herein, “framework region” or “FR” refers to a region in the variable domain which is located between the CDRs. As used herein, “complementary determining region” or “CDR” refers to variable regions in VHHs that contains the amino acid sequences capable of specifically binding to antigenic targets. In various embodiments, the present chimeric protein or chimeric protein complex comprises a VHH having a variable domain comprising at least one CDR1, CDR2, and/or CDR3 sequences.

[0537] In various embodiments, the targeting moieties of the invention may comprise any combination of heavy chain, light chain, heavy chain variable region, light chain variable region, complementarity determining region (CDR), and framework region sequences that is known to recognize and bind to SIRP1α.

[0538] In various embodiments, the SIRP1a targeting moiety comprises a VHH having a variable domain comprising at least one CDR1, CDR2, and/or CDR3 sequences. In various embodiments, the SIRP1a targeting moiety comprises a VHH having a variable region comprising at least one FR1, FR2, FR3, and FR4 sequences.

[0539] In some embodiments, a human SIRP1a CDR1 sequence is selected from: GRTFSSLDMG (SEQ ID NO: 277), SLDMG (SEQ ID NO: 278), GFTFGGYDMG (SEQ ID NO: 279), GYDMG (SEQ ID NO: 280), GRTSSSLDMG (SEQ ID NO: 281), GHTFSSLDMG (SEQ ID NO: 282), ERTFSSLDMG (SEQ ID NO: 283), GRAFSSLDMG (SEQ ID NO: 284), GLNFRRYTMG (SEQ ID NO: 285), and RYTMG (SEQ ID NO: 286).

[0540] In some embodiments, a human SIRP1a CDR2 sequence is selected from: GISRSGISQY (SEQ ID NO: 287), GISRSGISQYYADSMKG (SEQ ID NO: 288), GISRSGISQYYADSMRG (SEQ ID NO: 289), GISRTGISAY (SEQ ID NO: 290), GISRTGISAYYADSMKG (SEQ ID NO: 291), GISRSGISQYYANSMKG (SEQ ID NO: 292), GVSRSGISQY (SEQ ID NO: 293), GVSRSGISQYYADSMKG (SEQ ID NO: 294), VINWSDDSIY (SEQ ID NO: 295), and VINWSDDSIYYADSVKG (SEQ ID NO: 296).

[0541] In some embodiments, a human SIRP1a CDR3 sequence is selected from: ALTFRGSDLPRDSNY (SEQ ID NO: 297), ALTFRGSNLPRDSNY (SEQ ID NO: 298), and SPQWDTRVRQTMRGKYDY (SEQ ID NO: 299).

[0542] In various illustrative embodiments, a human SIRP1a targeting moiety comprises an amino acid sequence selected from the following sequences:

2HSI1:
(SEQ ID NO: 300)
QVQLQESGGGVVQAGDSLRLSCVASGRTFSSLDMGWFRQAPGKEREFVAG
ISRSGISQYYADSMKGRFTISRDNAKNLVYLQMNSLKPEDTAVYYCAAAL
TFRGSDLPRDSNYWGQGTQVTVSSAAAYPYDVPDYGSHHHHHH;
2HSI3:
(SEQ ID NO: 301)
QVQLQESGGGVVQAGDSLKLSCVASGRTFSSLDMGWFRQAPGKEREFVAG
ISRSGISQYYADSMKGRFTISRDNAKNLVYLQMNSLKPEDTAVYYCAAAL
TFRGSDLPRDSNYWGQGTQVTVSSAAAYPYDVPDYGSHHHHHH;
2HSI24:
(SEQ ID NO: 302)
QVQLQESGGGVVQAGDSLRLSCVASGRTFSSLDMGWFRQTPGKEREFVAG
ISRSGISQYYADSMKGRFTISRDNAKNLVYLQMNSLKPEDTAVYYCAAAL
TFRGSDLPRDSNYWGQGTQVTVSSAAAYPYDVPDYGSHHHHHH;
2HSI27:
(SEQ ID NO: 303)
QVQLQESGGGLVQPGDSLRLSCVASGRTFSSLDMGWFRQAPGKERXFVAG
ISRSGISQYYADSMKGRFTISRDNAKNLVYLQMNSLKPEDTAVYYCAAAL
TFRGSDLPRDSNYWGQGTQVTVSSAAAYPYDVPDYGSHHHHHH;
2HSI31:
(SEQ ID NO: 304)
QVQLQESGGGVVQAGDSLRLSCVASGRTFSSLDMGWFRQAPGKEREFVAG
ISRSGISQYYADSMRGRFTISRDNAKNLVYLQMNSLKPEDTAVYYCAAAL
TFRGSDLPRDSNYWGQGTQVTVSSAAAYPYDVPDYGSHHHHHH;
2HSI32:
(SEQ ID NO: 305)
QVQLQESGGGVVQAGDSLRLSCVASGRTFSSLDMGWFRQAPGKEREFVAG
ISRTGISAYYADSMKGRFTISRDNAKNLVYLQMNSLKSEDTAVYYCAAAL
TFRGSDLPRDSNYWGQGTQVTVSSAAAYPYDVPDYGSHHHHHH;
2HSI35:
(SEQ ID NO: 306)
QVQLQESGGGLVQPGGSLRLSCAASGFTFGGYDMGWFRQAPGKEREFVAG
ISRSGISQYYADSMKGRFTISRDNAKNLVYLQMNSLKPEDTAVYYCAAAL
TFRGSDLPRDSNYWGQGTQVTVSSAAAYPYDVPDYGSHHHHHH;
2HSI40:
(SEQ ID NO: 307)
QVQLQESGGGVVQAGDSLRLSCVASGRTFSSLDMGWFRQAPGKEREFVAG
ISRSGISQYYADSMKGRFTISRDNAKSLVYLQMNSLKPEDTAVYYCAAAL
TFRGSDLPRDSNYWGQGTQVTVSSAAAYPYDVPDYGSHHHHHH;
2HSI44:
(SEQ ID NO: 308)
QVQLQESGGGLVQAGGSLRLSCTASGRTFSSLDMGWFRQAPGKEREFVAG
ISRSGISQYYADSMKGRFTISRDNAKNLVYLQMNSLKPEDTAVYYCAAAL
TFRGSDLPRDSNYWGQGTQVTVSSAAAYPYDVPDYGSHHHHHH;
2HSI49:
(SEQ ID NO: 309)
QVQLQESGGGVVQTGDSLRLSCVASGRTFSSLDMGWFRQAPGKEREFVAG
ISRSGISQYYADSMKGRFTISRDNAKNLVYLQMNSLKPEDTAVYYCAAAL
TFRGSDLPRDSNYWGQGTQVTVSSAAAYPYDVPDYGSHHHHHH;
2HSI54:
(SEQ ID NO: 310)
QVQLQESGGGVVQAGDSLRLSCVASGRTFSSLDMGWFRQAPGKEREFVAG
ISRSGISQYYANSMKGRFTISRDNAKNLVYLQMNSLKPEDTAVYYCAAAL
TFRGSDLPRDSNYWGQGTQVTVSSAAAYPYDVPDYGSHHHHHH;
2HSI55:
(SEQ ID NO: 311)
QVQLQESGGGVVQAGDPLRLSCVASGRTFSSLDMGWFRQAPGKEREFVAG
ISRSGISQYYADSMKGRFTISRDNAKNLVYLQMNSLKPEDTAVYYCAAAL
TFRGSDLPRDSNYWGQGTQVTVSSAAAYPYDVPDYGSHHHHHH;
2HSI57:
(SEQ ID NO: 312)
QVQLQESGGGLVQAGGSLRLSCAASGRTFSSLDMGWFRQAPGKEREFVAG
ISRSGISQYYADSMKGRFTISRDNAKNLVYLQMNSLKPEDTAVYYCAAAL
TFRGSDLPRDSNYWGQGTQVTVSSAAAYPYDVPDYGSHHHHHH;
2HSI68:
(SEQ ID NO: 313)
QVQLQESGGGWVQPGGSLRLSCEASGRTSSSLDMGWFRQAPGKEREFVAG
ISRTGISAYYADSMKGRFTISRDNAKNLVYLQMNSLKSEDTAVYYCAAAL
TFRGSDLPRDSNYWGQGTQVTVSSAAAYPYDVPDYGSHHHHHH;
2HSI77:
(SEQ ID NO: 314)
QVQLQESGGGSVQAGGSLRLSCVASGRTFSSLDMGWFRQAPGKEREFVAG
ISRSGISQYYADSMKGRFTISRDNAKNLVYLQMNSLKPEDTAVYYCAAAL
TFRGSDLPRDSNYWGQGTQVTVSSAAAYPYDVPDYGSHHHHHH;
2HSI80:
(SEQ ID NO: 315)
QVQLQESGGGVVQAGDSLRLSCVASGRTFSSLDMGWFRQAPGKEREFVAG
VSRSGISQYYADSMKGRFTISRDNAKNLVYLQMNSLKPEDTAVYYCAAAL
TFRGSDLPRDSNYWGQGTQVTVSSAAAYPYDVPDYGSHHHHHH;
2HSI86:
(SEQ ID NO: 316)
QVQLQESGGGLVQPGGSLRLSCAASGRTFSSLDMGWFRQAPGKEREFVAG
ISRSGISQYYADSMKGRFTISRDNAKNLVYLQINSLKPEDTAVYYCAAAL
TFRGSDLPRDSNYWGQGTQVTVSSAAAYPYDVPDYGSHHHHHH;
2HSI88:
(SEQ ID NO: 317)
QVQLQESGGGVVQAGDSLRLSCVASGHTFSSLDMGWFRQAPGKEREFVAG
ISRSGISQYYADSMKGRFTISRDNAKNLVYLQMNSLKPEDTAVYYCAAAL
TFRGSDLPRDSNYWGQGTQVTVSSAAAYPYDVPDYGSHHHHHH;
2HSI89:
(SEQ ID NO: 318)
QVQLQESGGGVVQAGDSLRLSCVASERTFSSLDMGWFRQAPGKEREFVAG
ISRSGISQYYADSMKGRFTISRDNAKNLVYLQMNSLKPEDTAVYYCAAAL
TFRGSNLPRDSNYWGQGTQVTVSSAAAYPYDVPDYGSHHHHHH;
2HSI90:
(SEQ ID NO: 319)
QVQLQESGGGVVQAGDSLRLSCVASERTFSSLDMGWFRQAPGKEREFVAG
ISRSGISQYYADSMKGRFTISRDNAKNLVYLQMNSLKPEDTAVYYCAAAL
TFRGSDLPRDSNYWGQGTQVTVSSAAAYPYDVPDYGSHHHHHH;
2HSI98:
(SEQ ID NO: 320)
QVQLQESGGGVVQAGDSLGLSCVASGRTFSSLDMGWFRQAPGKEREFVAG
ISRSGISQYYADSMKGRFTISRDNAKNLVYLQMNSLKPEDTAVYYCAAAL
TFRGSDLPRDSNYWGQGTQVTVSSAAAYPYDVPDYGSHHHHHH;
2HSI102:
(SEQ ID NO: 321)
QVQLQESGGGVVQAGDSLRLSCVASGRAFSSLDMGWFRQAPGKEREFVAG
ISRSGISQYYADSMKGRFTISRDNAKNLVYLQMNSLKPEDTAVYYCAAAL
TFRGSDLPRDSNYWGQGTQVTVSSAAAYPYDVPDYGSHHHHHH;
2HSI105:
(SEQ ID NO: 322)
QVQLQESGGGVVQAGDSLRLSCVASGRTFSSLDMGWFRQAPGKEREFVAG
ISRSGISQYYADSMKGRFTISRDNAKNLVYLQMNSLRPEDTAVYYCAAAL
TFRGSDLPRDSNYWGQGTQVTVSSAAAYPYDVPDYGSHHHHHH;
2HSI109:
(SEQ ID NO: 323)
QVQLQESGGGSVQAGDSLRLSCVASGRTFSSLDMGWFRQAPGKEREFVAG
ISRTGISAYYADSMKGRFTISRDNAKNLVYLQMNSLKSEDTAVYYCAAAL
TFRGSDLPRDSNYWGQGTQVTVSSAAAYPYDVPDYGSHHHHHH;
2HSI110:
(SEQ ID NO: 324)
QVQLQESGGGLVQSGDSLRLSCVASGRTFSSLDMGWFRQAPGKEREFVAG
ISRSGISQYYADSMKGRFTISRDNAKNLVYLQMNSLKPEDTAVYYCAAAL
TFRGSDLPRDSNYWGQGTQVTVSSAAAYPYDVPDYGSHHHHHH;
2HSI113:
(SEQ ID NO: 325)
QVQLQESGGGLVQAGDSLRLSCVASGRTFSSLDMGWFRQAPGKEREFVAG
ISRSGISQYYADSMKGRFTISRDNAKNLVYLQMNSLKPEDTAVYYCAAAL
TFRGSDLPRDSNYWGQGTQVTVSSAAAYPYDVPDYGSHHHHHH;
and
2HSI22:
(SEQ ID NO: 326)
QVQLQESGGGLVQPGGSLRLSCAASGLNFRRYTMGWFRQAPGKEREFVGV
INWSDDSIYYADSVKGRFAISRDNTKNTVYLQMASLKPEDTAVYYCAASP
QWDTRVRQTMRGKYDYWGQGTQVTVSSAAAYPYDVPDYGSHHHHHH.

[0543] In various illustrative embodiments, the SIRP1a targeting moiety comprises an amino acid sequence selected from SEQ ID NO: 300 to SEQ ID NO: 326 without the terminal histidine tag sequence (i.e., HHHHHH; SEQ ID NO: 327).

[0544] In some embodiments, the SIRP1a targeting moiety comprises an amino acid sequence selected from SEQ ID Nos: 300 to SEQ ID NO: 326 (provided above) without the HA tag (i.e., YPYDVPDYGS; SEQ ID NO: 328).

[0545] In some embodiments, the SIRP1a targeting moiety comprises an amino acid sequence selected from SEQ ID Nos: 300 to SEQ ID NO: 326 (provided above) without the AAA linker.

[0546] In some embodiments, the SIRP1a targeting moiety comprises an amino acid sequence selected from SEQ ID Nos: 300 to SEQ ID NO: 326 (provided above) without the AAA linker, HA tag, and terminal histidine tag sequence (i.e., AAAYPYDVPDYGSHHHHHH; SEQ ID NO: 329).

[0547] In various embodiments, the present technology contemplates the use of any natural or synthetic analogs, mutants, variants, alleles, homologs and orthologs (herein collectively referred to as “analogs”) of the SIRP1a targeting moiety described herein. In various embodiments, the amino acid sequence of the SIRP1a targeting moiety further includes an amino acid analog, an amino acid derivative, or other non-classical amino acids.

[0548] In various embodiments, the SIRP1a targeting moiety comprises a sequence that is at least 60% identical to any one of the SIRP1a sequences disclosed herein. For example, the SIRP1a targeting moiety may comprise a sequence that is at least about 60%, at least about 61%, at least about 62%, at least about 63%, at least about 64%, at least about 65%, at least about 66%, at least about 67%, at least about 68%, at least about 69%, at least about 70%, at least about 71%, at least about 72%, at least about 73%, at least about 74%, at least about 75%, at least about 76%, at least about 77%, at least about 78%, at least about 79%, at least about 80%, at least about 81%, at least about 82%, at least about 83%, at least about 84%, at least about 85%, at least about 86%, at least about 87%, at least about 88%, at least about 89%, at least about 90%, at least about 91%, at least about 92%, at least about 93%, at least about 94%, at least about 95%, at least about 96%, at least about 97%, at least about 98%, at least about 99%, or 100% identical to any of the SIRP1a sequences disclosed herein (e.g., about 60%, or about 61%, or about 62%, or about 63%, or about 64%, or about 65%, or about 66%, or about 67%, or about 68%, or about 69%, or about 70%, or about 71%, or about 72%, or about 73%, or about 74%, or about 75%, or about 76%, or about 77%, or about 78%, or about 79%, or about 80%, or about 81%, or about 82%, or about 83%, or about 84%, or about 85%, or about 86%, or about 87%, or about 88%, or about 89%, or about 90%, or about 91%, or about 92%, or about 93%, or about 94%, or about 95%, or about 96%, or about 97%, or about 98%, about 99% or about 100% sequence identity to any one of the SIRP1a sequences disclosed herein).

[0549] In various embodiments, the SIRP1 targeting moiety comprising an amino acid sequence having one or more amino acid mutations with respect to any targeting moiety sequence that is known to recognize and bind to SIRP1α. In various embodiments, the SIRP1a targeting moiety comprises an amino acid sequence having one, or two, or three, or four, or five, or six, or seen, or eight, or nine, or ten, or fifteen, twenty, thirty, forty, or fifty amino acid mutations with respect to any targeting moiety sequence that is known to recognize and bind to SIRP1α. In some embodiments, the one or more amino acid mutations may be independently selected from substitutions, insertions, deletions, and truncations.

[0550] In some embodiments, the amino acid mutations are amino acid substitutions, and may include conservative and/or non-conservative substitutions.

[0551] “Conservative substitutions” may be made, for instance, on the basis of similarity in polarity, charge, size, solubility, hydrophobicity, hydrophilicity, and/or the amphipathic nature of the amino acid residues involved. The 20 naturally occurring amino acids can be grouped into the following six standard amino acid groups: (1) hydrophobic: Met, Ala, Val, Leu, Ile; (2) neutral hydrophilic: Cys, Ser, Thr; Asn, Gln; (3) acidic: Asp, Glu; (4) basic: His, Lys, Arg; (5) residues that influence chain orientation: Gly, Pro; and (6) aromatic: Trp, Tyr, Phe.

[0552] As used herein, “conservative substitutions” are defined as exchanges of an amino acid by another amino acid listed within the same group of the six standard amino acid groups shown above. For example, the exchange of Asp by Glu retains one negative charge in the so modified polypeptide. In addition, glycine and proline may be substituted for one another based on their ability to disrupt a-helices.

[0553] As used herein, “non-conservative substitutions” are defined as exchanges of an amino acid by another amino acid listed in a different group of the six standard amino acid groups (1) to (6) shown above.

[0554] In various embodiments, the substitutions may also include non-classical amino acids. Illustrative non-classical amino acids include, but are not limited to, selenocysteine, pyrrolysine, N-formylmethionine β-alanine, GABA and δ-Aminolevulinic acid, 4-aminobenzoic acid (PABA), D-isomers of the common amino acids, 2,4-diaminobutyric acid, α-amino isobutyric acid, 4-aminobutyric acid, Abu, 2-amino butyric acid, γ-Abu, ε-Ahx, 6-amino hexanoic acid, Aib, 2-amino isobutyric acid, 3-amino propionic acid, ornithine, norleucine, norvaline, hydroxyproline, sarcosme, citrulline, homocitrulline, cysteic acid, t-butylglycine, t-butylalanine, phenylglycine, cyclohexylalanine, β-alanine, fluoro-amino acids, designer amino acids such as @ methyl amino acids, C α-methyl amino acids, N α-methyl amino acids, and amino acid analogs in general.

[0555] In various embodiments, the amino acid mutation may be in the CDRs of the targeting moiety (e.g., the CDR1, CDR2 or CDR3 regions). In another embodiment, amino acid alteration may be in the framework regions (FRs) of the targeting moiety (e.g., the FR1, FR2, FR3, or FR4 regions).

[0556] Modification of the amino acid sequences may be achieved using any known technique in the art e.g., site-directed mutagenesis or PCR based mutagenesis. Such techniques are described, for example, in Sambrook et al., Molecular Cloning: A Laboratory Manual, Cold Spring Harbor Press, Plainview, N.Y., 1989 and Ausubel et al., Current Protocols in Molecular Biology, John Wiley & Sons, New York, N.Y., 1989.

[0557] In various embodiments, the mutations do not substantially reduce the SIRP1α's capability to specifically recognize and bind to SIRP1α. In various embodiments, the mutations do not substantially reduce the SIRP1α's capability to specifically bind to SIRP1a and without functionally modulating (e.g., partially or fully neutralizing) SIRP1α.

[0558] In various embodiments, the binding affinity of the SIRP1a targeting moiety for the full-length and/or mature forms and/or isoforms and/or splice variants and/or fragments and/or monomeric and/or dimeric forms and/or any other naturally occurring or synthetic analogs, variants, or mutants of SIRP1a may be described by the equilibrium dissociation constant (K_{D}). In various embodiments, the present SIRP1a targeting moiety comprises a targeting moiety that binds to the full-length and/or mature forms and/or isoforms and/or splice variants and/or fragments and/or any other naturally occurring or synthetic analogs, variants, or mutants (including monomeric and/or dimeric forms) of SIRP1a with a K_{D} of less than about 1 μM, about 900 nM, about 800 nM, about 700 nM, about 600 nM, about 500 nM, about 400 nM, about 300 nM, about 200 nM, about 100 nM, about 90 nM, about 80 nM, about 70 nM, about 60 nM, about 50 nM, about 40 nM, about 30 nM, about 20 nM, about 10 nM, or about 5 nM, or about 1 nM.

[0559] In various embodiments, the SIRP1a targeting moiety binds but does not functionally modulate the antigen of interest, i.e., SIRP1α. For instance, in various embodiments, the SIRP1a targeting moiety simply targets the antigen but does not substantially functionally modulate (e.g. substantially inhibit, reduce or neutralize) a biological effect that the antigen has. In various embodiments, the SIRP1a targeting moiety binds an epitope that is physically separate from an antigen site that is important for its biological activity (e.g. an antigen's active site).

[0560] In other embodiments, the SIRP1a targeting moiety binds but functionally modulates the antigen of interest, i.e., SIRP1α. For instance, in various embodiments, the SIRP1a targeting moiety targets the antigen, i.e., SIRP1a, and functionally modulates (e.g. inhibit, reduce or neutralize) a biological effect that the antigen has. Such binding along with functional modulation may find use in various embodiments of the present invention including methods in which the present chimeric protein or chimeric protein complex is used to directly or indirectly recruit active immune cells to a site of need via an effector antigen.

[0561] For example, in various embodiments, the present SIRP1a targeting moiety may be used to directly or indirectly recruit macrophages via SIRP1a to a tumor cell in a method of reducing or eliminating a tumor (e.g. the present chimeric protein or chimeric protein complex may comprise a targeting moiety having an anti-SIRP1a antigen recognition domain and a targeting moiety having a recognition domain (e.g. antigen recognition domain) directed against a tumor antigen or receptor). Evidence indicates that tumor cells frequently upregulate CD47 which engages SIRP1a so as to evade phagocytosis. Accordingly, in various embodiments, it may be desirable to directly or indirectly recruit macrophages to tumor cells and functionally inhibit, reduce, or neutralize the inhibitory activity of SIRP1a thereby resulting in phagocytosis of the tumor cells by the macrophages. In various embodiments, the SIRP1a targeting moiety enhances phagocytosis of tumor cells or any other undesirable cells by macrophages.

[0562] In some embodiments, the targeting moiety is a natural ligand such as a chemokine. Illustrative chemokines that may be included in the chimeric protein or chimeric protein complex of the invention include, but are not limited to, CCL1, CCL2, CCL4, CCL5, CCL6, CCL7, CCL8, CCL9, CCL10, CCL11, CCL12, CCL13, CCL14, CCL15, CCL16, C_{L}17, CCL18, CCL19, CCL20, CCL21, CCL22, CCL23, CCL24, CLL25, CCL26, CCL27, CXCL1, CXCL2, CXCL3, CXCL4, CXCL5, CXCL6, CXCL7, CXCL8, CXCL9, CXCL10, CXCL11, CXCL12, CXCL13, CXCL14, CXCL15, CXCL16, CXCL17, XCL1, XCL2, CX3CL1, HCC-4, and LDGF-PBP. In an illustrative embodiment, the targeting moiety may be XCL1 which is a chemokine that recognizes and binds to the dendritic cell receptor XCR1. For example, in some embodiments, the targeting moiety is an XCR1 binding agent, for example an antibody or antibody format directed against XCR1, the ligand XCL1, or the ligand XCL2.

[0563] An illustrative human XCL1 polypeptide is provided below:

(SEQ ID NO: 1456)
MRLLILALLGICSLTAYIVEGVGSEVSDKRTCVSLTTQRLPVSRIKTYTI
TEGSLRAVIFITKRGLKVCADPQATWVRDVVRSMDRKSNTRNNMIQTKPT
GTQQSTNTAVTLTG.

[0564] In some embodiments the ligand XCL1 comprises an amino acid sequence having 60%, 65%, 70%, 75%, 80%, 85%, 90%, or 95% sequence identity to SEQ ID NO: 1456. In some embodiments the ligand XCL1 comprises an amino acid sequence of SEQ ID NO: 1456. In some embodiments the ligand XCL1 comprises an amino acid sequence of SEQ ID NO: 1456, or a functional fragment thereof.

[0565] In another illustrative embodiment, the targeting moiety is CCL1, which is a chemokine that recognizes and binds to CCR8. In another illustrative embodiment, the targeting moiety is CCL2, which is a chemokine that recognizes and binds to CCR2 or CCR9. In another illustrative embodiment, the targeting moiety is CCL3, which is a chemokine that recognizes and binds to CCR1, CCR5, or CCR9. In another illustrative embodiment, the targeting moiety is CCL4, which is a chemokine that recognizes and binds to CCR1 or CCR5 or CCR9. In another illustrative embodiment, the targeting moiety is CCL5, which is a chemokine that recognizes and binds to CCR1 or CCR3 or CCR4 or CCR5. In another illustrative embodiment, the targeting moiety is CCL6, which is a chemokine that recognizes and binds to CCR1. In another illustrative embodiment, the targeting moiety is CCL7, which is a chemokine that recognizes and binds to CCR2 or CCR9. In another illustrative embodiment, the targeting moiety is CCL8, which is a chemokine that recognizes and binds to CCR1 or CCR2 or CCR2B or CCR5 or CCR9. In another illustrative embodiment, the targeting moiety is CCL9, which is a chemokine that recognizes and binds to CCR1. In another illustrative embodiment, the targeting moiety is CCL10, which is a chemokine that recognizes and binds to CCR1. In another illustrative embodiment, the targeting moiety is CCL11, which is a chemokine that recognizes and binds to CCR2 or CCR3 or CCR5 or CCR9. In another illustrative embodiment, the targeting moiety is CCL13, which is a chemokine that recognizes and binds to CCR2 or CCR3 or CCR5 or CCR9. In another illustrative embodiment, the targeting moiety is CCL14, which is a chemokine that recognizes and binds to CCR1 or CCR9. In another illustrative embodiment, the targeting moiety is CCL15, which is a chemokine that recognizes and binds to CCR1 or CCR3. In another illustrative embodiment, the targeting moiety is CCL16, which is a chemokine that recognizes and binds to CCR1, CCR2, CCR5, or CCR8. In another illustrative embodiment, the targeting moiety is CCL17, which is a chemokine that recognizes and binds to CCR4. In another illustrative embodiment, the targeting moiety is CCL 19, which is a chemokine that recognizes and binds to CCR7. In another illustrative embodiment, the targeting moiety is CCL20, which is a chemokine that recognizes and binds to CCR6.

[0566] In another illustrative embodiment, the targeting moiety is CCL21, which is a chemokine that recognizes and binds to CCR7. In another illustrative embodiment, the targeting moiety is CCL22, which is a chemokine that recognizes and binds to CCR4. In another illustrative embodiment, the targeting moiety is CCL23, which is a chemokine that recognizes and binds to CCR1. In another illustrative embodiment, the targeting moiety is CCL24, which is a chemokine that recognizes and binds to CCR3. In another illustrative embodiment, the targeting moiety is CCL25, which is a chemokine that recognizes and binds to CCR9. In another illustrative embodiment, the targeting moiety is CCL26, which is a chemokine that recognizes and binds to CCR3. In another illustrative embodiment, the targeting moiety is CCL27, which is a chemokine that recognizes and binds to CCR10. In another illustrative embodiment, the targeting moiety is CCL28, which is a chemokine that recognizes and binds to CCR3 or CCR10. In another illustrative embodiment, the targeting moiety is CXCL1, which is a chemokine that recognizes and binds to CXCR1 or CXCR2. In another illustrative embodiment, the targeting moiety is CXCL2, which is a chemokine that recognizes and binds to CXCR2. In another illustrative embodiment, the targeting moiety is CXCL3, which is a chemokine that recognizes and binds to CXCR2. In another illustrative embodiment, the targeting moiety is CXCL4, which is a chemokine that recognizes and binds to CXCR3B. In another illustrative embodiment, the targeting moiety is CXCL5, which is a chemokine that recognizes and binds to CXCR2. In another illustrative embodiment, the targeting moiety is CXCL6, which is a chemokine that recognizes and binds to CXCR1 or CXCR2. In another illustrative embodiment, the targeting moiety is CXCL8, which is a chemokine that recognizes and binds to CXCR1 or CXCR2. In another illustrative embodiment, the targeting moiety is CXCL9, which is a chemokine that recognizes and binds to CXCR3. In another illustrative embodiment, the targeting moiety is CXCL10, which is a chemokine that recognizes and binds to CXCR3. In another illustrative embodiment, the targeting moiety is CXCL11, which is a chemokine that recognizes and binds to CXCR3 or CXCR7. In another illustrative embodiment, the targeting moiety is CXCL 12, which is a chemokine that recognizes and binds to CXCR4 or CXCR7. In another illustrative embodiment, the targeting moiety is CXCL13, which is a chemokine that recognizes and binds to CXCR5. In another illustrative embodiment, the targeting moiety is CXCL16, which is a chemokine that recognizes and binds to CXCR6. In another illustrative embodiment, the targeting moiety is LDGF-PBP, which is a chemokine that recognizes and binds to CXCR2. In another illustrative embodiment, the targeting moiety is XCL2, which is a chemokine that recognizes and binds to XCR1. In another illustrative embodiment, the targeting moiety is CX3CL1, which is a chemokine that recognizes and binds to CX3CR1.

[0567] In various embodiments, the present chimeric protein or chimeric protein complex comprises targeting moieties in various combinations. In an illustrative embodiment, the present chimeric protein or chimeric protein complex may comprise two targeting moieties, wherein both targeting moieties are antibodies or derivatives thereof. In another illustrative embodiment, the present chimeric protein or chimeric protein complex may comprise two targeting moieties, wherein both targeting moieties are natural ligands for cell receptors. In a further illustrative embodiment, the present chimeric protein or chimeric protein complex may comprise two targeting moieties, wherein one of the targeting moieties is an antibody or derivative thereof, and the other targeting moiety is a natural ligand for a cell receptor.

[0568] In various embodiments, the recognition domain of the present chimeric protein or chimeric protein complex functionally modulates (by way of non-limitation, partially or completely neutralizes) the target (e.g., antigen, receptor) of interest, e.g., substantially inhibiting, reducing, or neutralizing a biological effect that the antigen has. For example, various recognition domains may be directed against one or more tumor antigens that are actively suppressing, or have the capacity to suppress, the immune system of, for example, a patient bearing a tumor. For example, in some embodiments, the present chimeric protein or chimeric protein complex functionally modulates immune inhibitory signals (e.g., checkpoint inhibitors), for example, one or more of TIM-3, BTLA, PD-1, CTLA-4, B7-H4, GITR, galectin-9, HVEM, PD-L1, PD-L2, B7-H3, CD244, CD160, TIGIT, SIRPα, ICOS, CD172a, and TMIGD2. For example, in some embodiments, the present chimeric protein or chimeric protein complex is engineered to disrupt, block, reduce, and/or inhibit the transmission of an immune inhibitory signal, by way of non-limiting example, the binding of PD-1 with PD-L1 or PD-L2 and/or the binding of CTLA-4 with one or more of AP2M1, CD80, CD86, SHP-2, and PPP2R5A.

[0569] In various embodiments, the recognition domain of the present chimeric protein or chimeric protein complex binds but does not functionally modulate the target (e.g., antigen, receptor) of interest, e.g., the recognition domain is, or is akin to, a binding antibody. For instance, in various embodiments, the recognition domain simply targets the antigen or receptor but does not substantially inhibit, reduce or functionally modulate a biological effect that the antigen or receptor has. For example, some of the smaller antibody formats described above (e.g., as compared to, for example, full antibodies) have the ability to target hard to access epitopes and provide a larger spectrum of specific binding locales. In various embodiments, the recognition domain binds an epitope that is physically separate from an antigen or receptor site that is important for its biological activity (e.g., the antigen's active site).

[0570] Such non-neutralizing binding finds use in various embodiments of the present invention, including methods in which the present chimeric protein or chimeric protein complex is used to directly or indirectly recruit active immune cells to a site of need via an effector antigen, such as any of those described herein. For example, in various embodiments, the present chimeric protein or chimeric protein complex may be used to directly or indirectly recruit cytotoxic T cells via CD8 to a tumor cell in a method of reducing or eliminating a tumor (e.g., the chimeric protein or chimeric protein complex may comprise an anti-CD8 recognition domain and a recognition domain directed against a tumor antigen). In such embodiments, it is desirable to directly or indirectly recruit CD8-expressing cytotoxic T cells but not to functionally modulate the CD8 activity. On the contrary, in these embodiments, CD8 signaling is an important piece of the tumor reducing or eliminating effect. By way of further example, in various methods of reducing or eliminating tumors, the present chimeric protein or chimeric protein complex is used to directly or indirectly recruit dendritic cells (DCs) via CLEC4C (e.g., the chimeric protein or chimeric protein complex may comprise an anti-CLEC4C recognition domain and a recognition domain directed against a tumor antigen). In such embodiments, it is desirable to directly or indirectly recruit CLEC4C-expressing DCs but not to functionally modulate the CLEC4C activity. On the contrary, in these embodiments, CLEC4C signaling is an important piece of the tumor reducing or eliminating effect.

[0571] In various embodiments, the recognition domain of the present chimeric protein or chimeric protein complex binds to XCR1 e.g., on dendritic cells. For instance, the recognition domain, in some embodiments, comprises all or part of XCL1 or XCL2 or an anti-XCR1 agent, which is optionally non-neutralizing.

[0572] In various embodiments, the recognition domain of the present chimeric protein or chimeric protein complex binds to an immune modulatory antigen (e.g., immune stimulatory or immune inhibitory). In various embodiments, the immune modulatory antigen is one or more of 4-1BB, OX-40, HVEM, GITR, CD27, CD28, CD30, CD40, ICOS ligand; OX-40 ligand, LIGHT (CD258), GITR ligand, CD70, B7-1, B7-2, CD30 ligand, CD40 ligand, ICOS, ICOS ligand, CD137 ligand and TL1A. In various embodiments, such immune stimulatory antigens are expressed on a tumor cell. In various embodiments, the recognition domain of the present chimeric protein or chimeric protein complex binds but does not functionally modulate such immune stimulatory antigens and therefore allows recruitment of cells expressing these antigens without the reduction or loss of their potential tumor reducing or eliminating capacity.

[0573] In various embodiments, the recognition domain of the present chimeric protein or chimeric protein complex may be in the context of chimeric protein or chimeric protein complex that comprises two recognition domains that have neutralizing activity, or comprises two recognition domains that have non-neutralizing (e.g., binding) activity, or comprises one recognition domain that has neutralizing activity and one recognition domain that has non-neutralizing (e.g., binding) activity.

[0574] In various embodiments, the multi-specific chimeric protein or chimeric protein complex has targeting moieties having recognition domains which specifically bind to a target (e.g. antigen, receptor) that is part of a non-cellular structure. In some embodiments, the antigen or receptor is not an integral component of an intact cell or cellular structure. In some embodiments, the antigen or receptor is an extracellular antigen or receptor. In some embodiments, the target is a non-proteinaceous, non-cellular marker, including, without limitation, nucleic acids, inclusive of DNA or RNA, such as, for example, DNA released from necrotic tumor cells or extracellular deposits such as cholesterol.

[0575] In some embodiments, the target (e.g. antigen, receptor) of interest is part of the non-cellular component of the stroma or the extracellular matrix (ECM) or the markers associated therewith. As used herein, stroma refers to the connective and supportive framework of a tissue or organ. Stroma may include a compilation of cells such as fibroblasts/myofibroblasts, glial, epithelia, fat, immune, vascular, smooth muscle, and immune cells along with the extracellular matrix (ECM) and extracellular molecules. In various embodiments, the target (e.g. antigen, receptor) of interest is part of the non-cellular component of the stroma such as the extracellular matrix and extracellular molecules. As used herein, the ECM refers to the non-cellular components present within all tissues and organs. The ECM is composed of a large collection of biochemically distinct components including, without limitation, proteins, glycoproteins, proteoglycans, and polysaccharides. These components of the ECM are usually produced by adjacent cells and secreted into the ECM via exocytosis. Once secreted, the ECM components often aggregate to form a complex network of macromolecules. In various embodiments, the chimeric protein or chimeric protein complex of the invention comprises a targeting moiety that recognizes a target (e.g., an antigen or receptor or non-proteinaceous molecule) located on any component of the ECM. Illustrative components of the ECM include, without limitation, the proteoglycans, the non-proteoglycan polysaccharides, fibers, and other ECM proteins or ECM non-proteins, e.g. polysaccharides and/or lipids, or ECM associated molecules (e.g. proteins or non-proteins, e.g. polysaccharides, nucleic acids and/or lipids).

[0576] In some embodiments, the targeting moiety recognizes a target (e.g. antigen, receptor) on ECM proteoglycans. Proteoglycans are glycosylated proteins. The basic proteoglycan unit includes a core protein with one or more covalently attached glycosaminoglycan (GAG) chains. Proteoglycans have a net negative charge that attracts positively charged sodium ions (Na+), which attracts water molecules via osmosis, keeping the ECM and resident cells hydrated. Proteoglycans may also help to trap and store growth factors within the ECM. Illustrative proteoglycans that may be targeted by the chimeric proteins or chimeric protein complexes of the invention include, but are not limited to, heparan sulfate, chondroitin sulfate, and keratan sulfate. In an embodiment, the targeting moiety recognizes a target (e.g. antigen, receptor) on non-proteoglycan polysaccharides such as hyaluronic acid.

[0577] In some embodiments, the targeting moiety recognizes a target (e.g. antigen, receptor) on ECM fibers. ECM fibers include collagen fibers and elastin fibers. In some embodiments, the targeting moiety recognizes one or more epitopes on collagens or collagen fibers. Collagens are the most abundant proteins in the ECM. Collagens are present in the ECM as fibrillar proteins and provide structural support to resident cells. In one or more embodiments, the targeting moiety recognizes and binds to various types of collagens present within the ECM including, without limitation, fibrilar collagens (types I, II, III, V, XI), facit collagens (types IX, XII, XIV), short chain collagens (types VIII, X), basement membrane collagens (type IV), and/or collagen types VI, VII, or XIII. Elastin fibers provide elasticity to tissues, allowing them to stretch when needed and then return to their original state. In some embodiments, the target moiety recognizes one or more epitopes on elastins or elastin fibers.

[0578] In some embodiments, the targeting moiety recognizes one or more ECM proteins including, but not limited to, a tenascin, a fibronectin, a fibrin, a laminin, or a nidogen/entactin.

[0579] In an embodiment, the targeting moiety recognizes and binds to tenascin. The tenascin (TN) family of glycoproteins includes at least four members, tenascin-C, tenascin-R, tenascin-X, and tenascin W. The primary structures of tenascin proteins include several common motifs ordered in the same consecutive sequence: amino-terminal heptad repeats, epidermal growth factor (EGF)-like repeats, fibronectin type III domain repeats, and a carboxyl-terminal fibrinogen-like globular domain. Each protein member is associated with typical variations in the number and nature of EGF-like and fibronectin type III repeats. Isoform variants also exist particularly with respect to tenascin-C. Over 27 splice variants and/or isoforms of tenascin-C are known. In a particular embodiment, the targeting moiety recognizes and binds to tenascin-CA1. Similarly, tenascin-R also has various splice variants and isoforms. Tenascin-R usually exists as dimers or trimers. Tenascin-X is the largest member of the tenascin family and is known to exist as trimers. Tenascin-W exists as trimers. In some embodiments, the targeting moiety recognizes one or more epitopes on a tenascin protein. In some embodiments, the targeting moiety recognizes the monomeric and/or the dimeric and/or the trimeric and/or the hexameric forms of a tenascin protein.

[0580] In an embodiment, the targeting moieties recognize and bind to fibronectin. Fibronectins are glycoproteins that connect cells with collagen fibers in the ECM, allowing cells to move through the ECM. Upon binding to integrins, fibronectins unfold to form functional dimers. In some embodiments, the targeting moiety recognizes the monomeric and/or the dimeric forms of fibronectin. In some embodiments, the targeting moiety recognizes one or more epitopes on fibronectin. In illustrative embodiments, the targeting moiety recognizes fibronectin extracellular domain A(EDA) or fibronectin extracellular domain B (EDB). Elevated levels of EDA are associated with various diseases and disorders including psoriasis, rheumatoid arthritis, diabetes, and cancer. In some embodiments, the targeting moiety recognizes fibronectin that contains the EDA isoform and may be utilized to target the chimeric protein or chimeric protein complex to diseased cells including cancer cells. In some embodiments, the targeting moiety recognizes fibronectin that contains the EDB isoform. In various embodiments, such targeting moieties may be utilized to target the chimeric protein or chimeric protein complex to tumor cells including the tumor neovasculature.

[0581] In an embodiment, the targeting moiety recognizes and binds to fibrin. Fibrin is another protein substance often found in the matrix network of the ECM. Fibrin is formed by the action of the protease thrombin on fibrinogen which causes the fibrin to polymerize. In some embodiments, the targeting moiety recognizes one or more epitopes on fibrin. In some embodiments, the targeting moiety recognizes the monomeric as well as the polymerized forms of fibrin.

[0582] In an embodiment, the targeting moiety recognizes and binds to laminin. Laminin is a major component of the basal lamina, which is a protein network foundation for cells and organs. Laminins are heterotrimeric proteins that contain an α-chain, a β-chain, and a γ-chain. In some embodiments, the targeting moiety recognizes one or more epitopes on laminin. In some embodiments, the targeting moiety recognizes the monomeric, the dimeric as well as the trimeric forms of laminin.

[0583] In an embodiment, the targeting moiety recognizes and binds to a nidogen or entactin. Nidogens/entactins are a family of highly conserved, sulfated glycoproteins. They make up the major structural component of the basement membranes and function to link laminin and collagen IV networks in basement membranes. Members of this family include nidogen-1 and nidogen-2. In various embodiments, the targeting moiety recognizes an epitope on nidogen-1 and/or nidogen-2.

[0584] In various embodiments, the targeting moiety comprises an antigen recognition domain that recognizes an epitope present on any of the targets (e.g., ECM proteins) described herein. In an embodiment, the antigen-recognition domain recognizes one or more linear epitopes present on the protein. As used herein, a linear epitope refers to any continuous sequence of amino acids present on the protein. In another embodiment, the antigen-recognition domain recognizes one or more conformational epitopes present on the protein. As used herein, a conformation epitope refers to one or more sections of amino acids (which may be discontinuous) which form a three-dimensional surface with features and/or shapes and/or tertiary structures capable of being recognized by an antigen recognition domain.

[0585] In various embodiments, the targeting moiety may bind to the full-length and/or mature forms and/or isoforms and/or splice variants and/or fragments and/or any other naturally occurring or synthetic analogs, variants, or mutants of any of the targets (e.g., ECM proteins) described herein. In various embodiments, the targeting moiety may bind to any forms of the proteins described herein, including monomeric, dimeric, trimeric, tetrameric, heterodimeric, multimeric and associated forms. In various embodiments, the targeting moiety may bind to any post-translationally modified forms of the proteins described herein, such as glycosylated and/or phosphorylated forms.

[0586] In various embodiments, the targeting moiety comprises an antigen recognition domain that recognizes extracellular molecules such as DNA. In some embodiments, the targeting moiety comprises an antigen recognition domain that recognizes DNA. In an embodiment, the DNA is shed into the extracellular space from necrotic or apoptotic tumor cells or other diseased cells.

[0587] In various embodiments, the targeting moiety comprises an antigen recognition domain that recognizes one or more non-cellular structures associated with atherosclerotic plaques. Two types of atherosclerotic plaques are known. The fibro-lipid (fibro-fatty) plaque is characterized by an accumulation of lipid-laden cells underneath the intima of the arteries. Beneath the endothelium there is a fibrous cap covering the atheromatous core of the plaque. The core includes lipid-laden cells (macrophages and smooth muscle cells) with elevated tissue cholesterol and cholesterol ester content, fibrin, proteoglycans, collagen, elastin, and cellular debris. In advanced plaques, the central core of the plaque usually contains extracellular cholesterol deposits (released from dead cells), which form areas of cholesterol crystals with empty, needle-like clefts. At the periphery of the plaque are younger foamy cells and capillaries. A fibrous plaque is also localized under the intima, within the wall of the artery resulting in thickening and expansion of the wall and, sometimes, spotty localized narrowing of the lumen with some atrophy of the muscular layer. The fibrous plaque contains collagen fibers (eosinophilic), precipitates of calcium (hematoxylinophilic) and lipid-laden cells. In some embodiments, the targeting moiety recognizes and binds to one or more of the non-cellular components of these plaques such as the fibrin, proteoglycans, collagen, elastin, cellular debris, and calcium or other mineral deposits or precipitates. In some embodiments, the cellular debris is a nucleic acid, e.g. DNA or RNA, released from dead cells.

[0588] In various embodiments, the targeting moiety comprises an antigen recognition domain that recognizes one or more non-cellular structures found in the brain plaques associated with neurodegenerative diseases. In some embodiments, the targeting moiety recognizes and binds to one or more non-cellular structures located in the amyloid plaques found in the brains of patients with Alzheimer's disease. For example, the targeting moiety may recognize and bind to the peptide amyloid beta, which is a major component of the amyloid plaques. In some embodiments, the targeting moiety recognizes and binds to one or more non-cellular structures located in the brains plaques found in patients with Huntington's disease. In various embodiments, the targeting moiety recognizes and binds to one or more non-cellular structures found in plaques associated with other neurodegenerative or musculoskeletal diseases such as Lewy body dementia and inclusion body myositis.

### Linkers and Functional Groups

[0589] In various embodiments, the Clec4C binding agent may include one or more functional groups, residues, or moieties. In various embodiments, the one or more functional groups, residues, or moieties are attached or genetically fused to any of the signaling agents or targeting moieties (e.g., Clec4C) described herein. In some embodiments, such functional groups, residues or moieties confer one or more desired properties or functionalities to the Clec4C binding agent of the invention. Examples of such functional groups and of techniques for introducing them into the Clec4C binding agent are known in the art, for example, see Remington's Pharmaceutical Sciences, 16th ed., Mack Publishing Co., Easton, Pa. (1980).

[0590] In various embodiments, the Clec4C binding agent may by conjugated and/or fused with another agent to extend half-life or otherwise improve pharmacodynamic and pharmacokinetic properties. In some embodiments, the Clec4C binding agent may be fused or conjugated with one or more of PEG, XTEN (e.g., as rPEG), polysialic acid (POLYXEN), albumin (e.g., human serum albumin or HAS), elastin-like protein (ELP), PAS, HAP, GLK, CTP, transferrin, and the like. In some embodiments, the Clec4C binding agent may be fused or conjugated with an antibody or an antibody fragment such as an Fc fragment. For example, the Clec4C binding agent may be fused to either the N-terminus or the C-terminus of the Fc domain of human immunoglobulin (Ig) G. In various embodiments, each of the individual chimeric proteins or chimeric protein complexes is fused to one or more of the agents described in BioDrugs (2015) 29:215-239, the entire contents of which are hereby incorporated by reference.

[0591] In some embodiments, the functional groups, residues, or moieties comprise a suitable pharmacologically acceptable polymer, such as poly(ethyleneglycol) (PEG) or derivatives thereof (such as methoxypoly(ethyleneglycol) or mPEG). In some embodiments, attachment of the PEG moiety increases the half-life and/or reduces the immunogenecity of the Clec4C binding agent. Generally, any suitable form of pegylation can be used, such as the pegylation used in the art for antibodies and antibody fragments (including but not limited to single domain antibodies such as VHHs); see, for example, Chapman, Nat. Biotechnol., 54, 531-545 (2002); by Veronese and Harris, Adv. Drug Deliv. Rev. 54, 453-456 (2003), by Harris and Chess, Nat. Rev. Drug. Discov., 2, (2003) and in WO04060965, the entire contents of which are hereby incorporated by reference. Various reagents for pegylation of proteins are also commercially available, for example, from Nektar Therapeutics, USA. In some embodiments, site-directed pegylation is used, in particular via a cysteine-residue (see, for example, Yang et al., Protein Engineering, 16, 10, 761-770 (2003), the entire contents of which is hereby incorporated by reference). For example, for this purpose, PEG may be attached to a cysteine residue that naturally occurs in the present chimeric protein or chimeric protein complex of the invention. In some embodiments, the present chimeric protein or chimeric protein complex of the invention is modified so as to suitably introduce one or more cysteine residues for attachment of PEG, or an amino acid sequence comprising one or more cysteine residues for attachment of PEG may be fused to the amino- and/or carboxy-terminus of the present chimeric protein, using techniques known in the art.

[0592] In some embodiments, the functional groups, residues, or moieties comprise N-linked or O-linked glycosylation. In some embodiments, the N-linked or O-linked glycosylation is introduced as part of a co-translational and/or post-translational modification.

[0593] In some embodiments, the functional groups, residues, or moieties comprise one or more detectable labels or other signal-generating groups or moieties. Suitable labels and techniques for attaching, using and detecting them are known in the art and, include, but are not limited to, fluorescent labels (such as fluorescein, isothiocyanate, rhodamine, phycoerythrin, phycocyanin, allophycocyanin, o-phthaldehyde, and fluorescamine and fluorescent metals such as Eu or others metals from the lanthanide series), phosphorescent labels, chemiluminescent labels or bioluminescent labels (such as luminal, isoluminol, theromatic acridinium ester, imidazole, acridinium salts, oxalate ester, dioxetane or GFP and its analogs), radio-isotopes, metals, metals chelates or metallic cations or other metals or metallic cations that are particularly suited for use in in vivo, in vitro or in situ diagnosis and imaging, as well as chromophores and enzymes (such as malate dehydrogenase, staphylococcal nuclease, delta-V-steroid isomerase, yeast alcohol dehydrogenase, alpha-glycerophosphate dehydrogenase, triose phosphate isomerase, biotinavidin peroxidase, horseradish peroxidase, alkaline phosphatase, asparaginase, glucose oxidase, beta-galactosidase, ribonuclease, urease, catalase, glucose-VI-phosphate dehydrogenase, glucoamylase and acetylcholine esterase). Other suitable labels include moieties that can be detected using NMR or ESR spectroscopy. Such labeled VHHs and polypeptides of the invention may, for example, be used for in vitro, in vivo or in situ assays (including immunoassays known per se such as ELISA, RIA, EIA and other “sandwich assays,” etc.) as well as in vivo diagnostic and imaging purposes, depending on the choice of the specific label.

[0594] In some embodiments, the functional groups, residues, or moieties comprise a tag that is attached or genetically fused to the chimeric protein. In some embodiments, the present chimeric protein or chimeric protein complex may include a single tag or multiple tags. The tag for example is a peptide, sugar, or DNA molecule that does not inhibit or prevent binding of the Clec4C binding agent to Clec4C or any other antigen of interest such as tumor antigens. In various embodiments, the tag is at least about: three to five amino acids long, five to eight amino acids long, eight to twelve amino acids long, twelve to fifteen amino acids long, or fifteen to twenty amino acids long. Illustrative tags are described for example, in U.S. Patent Publication No. US2013/0058962. In some embodiment, the tag is an affinity tag such as glutathione-S-transferase (GST) and histidine (His) tag. In an embodiment, the present chimeric protein or chimeric protein complex comprises a His tag.

[0595] In some embodiments, the functional groups, residues, or moieties comprise a chelating group, for example, to chelate one of the metals or metallic cations. Suitable chelating groups, for example, include, without limitation, diethyl-enetriaminepentaacetic acid (DTPA) or ethylenediaminetetraacetic acid (EDTA).

[0596] In some embodiments, the functional groups, residues, or moieties comprise a functional group that is one part of a specific binding pair, such as the biotin-(strept) avidin binding pair. Such a functional group may be used to link the present chimeric protein or chimeric protein complex of the invention to another protein, polypeptide or chemical compound that is bound to the other half of the binding pair, i.e., through formation of the binding pair. For example, a present chimeric protein or chimeric protein complex of the invention may be conjugated to biotin, and linked to another protein, polypeptide, compound or carrier conjugated to avidin or streptavidin. For example, such a conjugated present chimeric protein or chimeric protein complex may be used as a reporter, for example, in a diagnostic system where a detectable signal-producing agent is conjugated to avidin or streptavidin. Such binding pairs may, for example, also be used to bind the present chimeric protein or chimeric protein complex to a carrier, including carriers suitable for pharmaceutical purposes. One non-limiting example are the liposomal formulations described by Cao and Suresh, Journal of Drug Targeting, 8, 4, 257 (2000). Such binding pairs may also be used to link a therapeutically active agent to the chimeric protein or chimeric protein complex of the invention.

[0597] In some embodiments, the present chimeric protein or chimeric protein complex optionally comprises one or more linkers. In some embodiments, the present chimeric protein or chimeric protein complex comprises a linker connecting the targeting moiety and the signaling agent. In some embodiments, the present chimeric protein or chimeric protein complex comprises a linker within the signaling agent (e.g. in the case of single chain TNF, which can comprise two linkers to yield a trimer).

[0598] In some embodiments, vectors encoding the present chimeric proteins or chimeric protein complexes linked as a single nucleotide sequence to any of the linkers described herein are provided and may be used to prepare such chimeric proteins or chimeric protein complexes or chimeric protein complexes.

[0599] In some embodiments, the linker length allows for efficient binding of a targeting moiety and the signaling agent to their receptors. For instance, in some embodiments, the linker length allows for efficient binding of one of the targeting moieties and the signaling agent to receptors on the same cell as well as the efficient binding of the other targeting moiety to another cell. Illustrative pairs of cells are provided elsewhere herein.

[0600] In some embodiments the linker length is at least equal to the minimum distance between the binding sites of one of the targeting moieties and the signaling agent to receptors on the same cell. In some embodiments the linker length is at least twice, or three times, or four times, or five times, or ten times, or twenty times, or 25 times, or 50 times, or one hundred times, or more the minimum distance between the binding sites of one of the targeting moieties and the signaling agent to receptors on the same cell.

[0601] As described herein, the linker length allows for efficient binding of one of the targeting moieties and the signaling agent to receptors on the same cell, the binding being sequential, e.g. targeting moiety/receptor binding preceding signaling agent/receptor binding.

[0602] In some embodiments, there are two linkers in a single chimera, each connecting the signaling agent to a targeting moiety. In various embodiments, the linkers have lengths that allow for the formation of a site that has a disease cell and an effector cell without steric hindrance that would prevent modulation of the either cell.

[0603] The invention contemplates the use of a variety of linker sequences. In various embodiments, the linker may be derived from naturally occurring multi-domain proteins or are empirical linkers as described, for example, in Chichili et al., (2013), Protein Sci. 22 (2): 153-167, Chen et al., (2013), Adv Drug Deliv Rev. 65 (10): 1357-1369, the entire contents of which are hereby incorporated by reference. In some embodiments, the linker may be designed using linker designing databases and computer programs such as those described in Chen et al., (2013), Adv Drug Deliv Rev. 65 (10): 1357-1369 and Crasto et al., (2000), Protein Eng. 13 (5): 309-312, the entire contents of which are hereby incorporated by reference. In various embodiments, the linker may be functional. For example, without limitation, the linker may function to improve the folding and/or stability, improve the expression, improve the pharmacokinetics, and/or improve the bioactivity of the present chimeric protein.

[0604] In some embodiments, the linker is a polypeptide. In some embodiments, the linker is less than about 100 amino acids long. For example, the linker may be less than about 100, about 95, about 90, about 85, about 80, about 75, about 70, about 65, about 60, about 55, about 50, about 45, about 40, about 35, about 30, about 25, about 20, about 19, about 18, about 17, about 16, about 15, about 14, about 13, about 12, about 11, about 10, about 9, about 8, about 7, about 6, about 5, about 4, about 3, or about 2 amino acids long. In some embodiments, the linker is a polypeptide. In some embodiments, the linker is greater than about 100 amino acids long. For example, the linker may be greater than about 100, about 95, about 90, about 85, about 80, about 75, about 70, about 65, about 60, about 55, about 50, about 45, about 40, about 35, about 30, about 25, about 20, about 19, about 18, about 17, about 16, about 15, about 14, about 13, about 12, about 11, about 10, about 9, about 8, about 7, about 6, about 5, about 4, about 3, or about 2 amino acids long. In some embodiments, the linker is flexible. In another embodiment, the linker is rigid.

[0605] In some embodiments, a linker connects the two targeting moieties to each other and this linker has a short length and a linker connects a targeting moiety and a signaling agent this linker is longer than the linker connecting the two targeting moieties. For example, the difference in amino acid length between the linker connecting the two targeting moieties and the linker connecting a targeting moiety and a signaling agent may be about 100, about 95, about 90, about 85, about 80, about 75, about 70, about 65, about 60, about 55, about 50, about 45, about 40, about 35, about 30, about 25, about 20, about 19, about 18, about 17, about 16, about 15, about 14, about 13, about 12, about 11, about 10, about 9, about 8, about 7, about 6, about 5, about 4, about 3, or about 2 amino acids.

[0606] In various embodiments, the linker is substantially comprised of glycine and serine residues (e.g. about 30%, or about 40%, or about 50%, or about 60%, or about 70%, or about 80%, or about 90%, or about 95%, or about 97% glycines and serines). For example, in some embodiments, the linker is (Gly4Ser)ₙ, where n is from about 1 to about 8, e.g. 1, 2, 3, 4, 5, 6, 7, or 8 (SEQ ID NO: 247-SEQ ID NO: 254). In an embodiment, the linker sequence is GGSGGSGGGGSGGGGS (SEQ ID NO: 255). Additional illustrative linkers include, but are not limited to, linkers having the sequence LE, GGGGS (SEQ ID NO: 247), (GGGGS) n (n=1-4) (SEQ ID NO: 247-SEQ ID NO: 250), (Gly): (SEQ ID NO: 256), (Gly) 6 (SEQ ID NO: 257), (EAAAK), (n=1-3) (SEQ ID NO: 258-SEQ ID NO: 260), A(EAAAK),A(n=2-5) (SEQ ID NO: 261-SEQ ID NO: 264), AEAAAKEAAAKA(SEQ ID NO: 261), A(EAAAK) 4ALEA(EAAAK) 4A(SEQ ID NO: 265), PAPAP (SEQ ID NO: 266), KESGSVSSEQLAQFRSLD (SEQ ID NO: 267), EGKSSGSGSESKST (SEQ ID NO: 268), GSAGSAAGSGEF (SEQ ID NO: 269), and (XP)ₙ, with X designating any amino acid, e.g., Ala, Lys, or Glu. In various embodiments, the linker is (GGS) n (n=1-20) (SEQ ID NOs: 1162-1181). In some embodiments, the linker is G. In some embodiments, the linker is AAA. In some embodiments, the linker is (GGGGS) n (n=5-20) (SEQ ID NOs: 251-254 and SEQ ID NOs: 1182-1193).

[0607] In some embodiments, the linker is one or more of GGGSE (SEQ ID NO: 270), GSESG (SEQ ID NO: 271), GSEGS (SEQ ID NO: 272), GEGGSGEGSSGEGSSSEGGGSEGGGSEGGGSEGGS (SEQ ID NO: 273), and a linker of randomly placed G, S, and E every 4 amino acid intervals.

[0608] In some embodiments, the linker is a hinge region of an antibody (e.g., of IgG, IgA, IgD, and IgE, inclusive of subclasses (e.g. IgG1, IgG2, IgG3, and IgG4, and IgA1 and IgA2)). In various embodiments, the linker is a hinge region of an antibody (e.g., of IgG, IgA, IgD, and IgE, inclusive of subclasses (e.g. IgG1, IgG2, IgG3, and IgG4, and IgA1 and IgA2). The hinge region, found in IgG, IgA, IgD, and IgE class antibodies, acts as a flexible spacer, allowing the Fab portion to move freely in space. In contrast to the constant regions, the hinge domains are structurally diverse, varying in both sequence and length among immunoglobulin classes and subclasses. For example, the length and flexibility of the hinge region varies among the IgG subclasses. The hinge region of IgG1 encompasses amino acids 216-231 and, because it is freely flexible, the Fab fragments can rotate about their axes of symmetry and move within a sphere centered at the first of two inter-heavy chain disulfide bridges. IgG2 has a shorter hinge than IgG1, with 12 amino acid residues and four disulfide bridges. The hinge region of IgG2 lacks a glycine residue, is relatively short, and contains a rigid poly-proline double helix, stabilized by extra inter-heavy chain disulfide bridges. These properties restrict the flexibility of the IgG2 molecule. IgG3 differs from the other subclasses by its unique extended hinge region (about four times as long as the IgG1 hinge), containing 62 amino acids (including 21 prolines and 11 cysteines), forming an inflexible poly-proline double helix. In IgG3, the Fab fragments are relatively far away from the Fc fragment, giving the molecule a greater flexibility. The elongated hinge in IgG3 is also responsible for its higher molecular weight compared to the other subclasses. The hinge region of IgG4 is shorter than that of IgG1 and its flexibility is intermediate between that of IgG1 and IgG2. The flexibility of the hinge regions reportedly decreases in the order IgG3>IgG1>IgG4>IgG2.

[0609] According to crystallographic studies, the immunoglobulin hinge region can be further subdivided functionally into three regions: the upper hinge region, the core region, and the lower hinge region. See Shin et al., 1992 Immunological Reviews 130:87. The upper hinge region includes amino acids from the carboxyl end of CHI to the first residue in the hinge that restricts motion, generally the first cysteine residue that forms an interchain disulfide bond between the two heavy chains. The length of the upper hinge region correlates with the segmental flexibility of the antibody. The core hinge region contains the inter-heavy chain disulfide bridges, and the lower hinge region joins the amino terminal end of the C_{H2} domain and includes residues in C_{H2}. Id. The core hinge region of wild-type human IgG1 contains the sequence Cys-Pro-Pro-Cys (SEQ ID NO: 274) which, when dimerized by disulfide bond formation, results in a cyclic octapeptide believed to act as a pivot, thus conferring flexibility. In various embodiments, the present linker comprises, one, or two, or three of the upper hinge region, the core region, and the lower hinge region of any antibody (e.g., of IgG, IgA, IgD, and IgE, inclusive of subclasses (e.g. IgG1, IgG2, IgG3, and IgG4, and IgA1 and IgA2). The hinge region may also contain one or more glycosylation sites, which include a number of structurally distinct types of sites for carbohydrate attachment. For example, IgA1 contains five glycosylation sites within a 17-amino-acid segment of the hinge region, conferring resistance of the hinge region polypeptide to intestinal proteases, considered an advantageous property for a secretory immunoglobulin. In various embodiments, the linker of the present invention comprises one or more glycosylation sites. In various embodiments, the linker is a hinge-CH2-CH3 domain of a human IgG4 antibody.

[0610] If desired, the present chimeric protein can be linked to an antibody Fc region, comprising one or both of C_{H}2 and C_{H}3 domains, and optionally a hinge region. For example, vectors encoding the present chimeric proteins or chimeric protein complexes linked as a single nucleotide sequence to an Fc region can be used to prepare such polypeptides.

[0611] In some embodiments, the linker is a synthetic linker such as PEG.

[0612] In various embodiments, the linker may be functional. For example, without limitation, the linker may function to improve the folding and/or stability, improve the expression, improve the pharmacokinetics, and/or improve the bioactivity of the present chimeric protein. In another example, the linker may function to target the chimeric protein or chimeric protein complex to a particular cell type or location.

### Modifications and Production of Chimeric Proteins

[0613] In various embodiments, the Clec4C binding agent comprises a targeting moiety that is a VHH. In various embodiments, the VHH is not limited to a specific biological source or to a specific method of preparation. For example, the VHH can generally be obtained: (1) by isolating the V_{H}H domain of a naturally occurring heavy chain antibody; (2) by expression of a nucleotide sequence encoding a naturally occurring V_{H}H domain; (3) by “humanization” of a naturally occurring VHH domain or by expression of a nucleic acid encoding a such humanized V_{H}H domain; (4) by “camelization” of a naturally occurring V_{H} domain from any animal species, such as from a mammalian species, such as from a human being, or by expression of a nucleic acid encoding such a camelized V_{H} domain; (5) by “camelization” of a “domain antibody” or “Dab” as described in the art, or by expression of a nucleic acid encoding such a camelized V_{H} domain; (6) by using synthetic or semi-synthetic techniques for preparing proteins, polypeptides or other amino acid sequences known in the art; (7) by preparing a nucleic acid encoding a VHH using techniques for nucleic acid synthesis known in the art, followed by expression of the nucleic acid thus obtained; and/or (8) by any combination of one or more of the foregoing.

[0614] In an embodiment, the Clec4C binding agent comprises a VHH that corresponds to the VHH domains of naturally occurring heavy chain antibodies directed against human Clec4C. In some embodiments, such VHH sequences can generally be generated or obtained by suitably immunizing a species of Camelid with a Clec4C molecule, (i.e., so as to raise an immune response and/or heavy chain antibodies directed against Clec4C), by obtaining a suitable biological sample from the Camelid (such as a blood sample, or any sample of B-cells), and by generating VAH sequences directed against Clec4C starting from the sample, using any suitable known techniques. In some embodiments, naturally occurring V_{H}H domains against Clec4C can be obtained from naive libraries of Camelid V_{H}H sequences, for example, by screening such a library using Clec4C or at least one part, fragment, antigenic determinant or epitope thereof using one or more screening techniques known in the art. Such libraries and techniques are, for example, described in WO9937681, WO0190190, WO03025020 and WO03035694, the entire contents of which are hereby incorporated by reference. In some embodiments, improved synthetic or semi-synthetic libraries derived from naive V_{H}H libraries may be used, such as VHH libraries obtained from naive V_{H}H libraries by techniques such as random mutagenesis and/or CDR shuffling, as for example, described in WO0043507, the entire contents of which are hereby incorporated by reference. In some embodiments, another technique for obtaining V_{H}H sequences directed against a Clec4C involves suitably immunizing a transgenic mammal that is capable of expressing heavy chain antibodies (i.e., so as to raise an immune response and/or heavy chain antibodies directed against Clec4C), obtaining a suitable biological sample from the transgenic mammal (such as a blood sample, or any sample of B-cells), and then generating V_{H}H sequences directed against Clec4C starting from the sample, using any suitable known techniques. For example, for this purpose, the heavy chain antibody-expressing mice and the further methods and techniques described in WO02085945 and in WO04049794 (the entire contents of which are hereby incorporated by reference) can be used.

[0615] In an embodiment, the chimeric protein or chimeric protein complex comprises a VHH that has been “humanized” i.e., by replacing one or more amino acid residues in the amino acid sequence of the naturally occurring VHH sequence (and in particular in the framework sequences) by one or more of the amino acid residues that occur at the corresponding position(s) in a V_{H} domain from a conventional 4-chain antibody from a human being. This can be performed using humanization techniques known in the art. In some embodiments, possible humanizing substitutions or combinations of humanizing substitutions may be determined by methods known in the art, for example, by a comparison between the sequence of a VHH and the sequence of a naturally occurring human V_{H} domain. In some embodiments, the humanizing substitutions are chosen such that the resulting humanized VHHs still retain advantageous functional properties. Generally, as a result of humanization, the VHHs of the invention may become more “human-like,” while still retaining favorable properties such as a reduced immunogenicity, compared to the corresponding naturally occurring VHH domains. In various embodiments, the humanized VHHs of the invention can be obtained in any suitable manner known in the art and thus are not strictly limited to polypeptides that have been obtained using a polypeptide that comprises a naturally occurring VHH domain as a starting material.

[0616] In an embodiment, the chimeric protein or chimeric protein complex comprises a VHH that has been “camelized,” i.e., by replacing one or more amino acid residues in the amino acid sequence of a naturally occurring VH domain from a conventional 4-chain antibody by one or more of the amino acid residues that occur at the corresponding position(s) in a VHH domain of a heavy chain antibody of a camelid. In some embodiments, such “camelizing” substitutions are inserted at amino acid positions that form and/or are present at the VH-VL interface, and/or at the so-called Camelidae hallmark residues (see, for example, WO9404678, the entire contents of which are hereby incorporated by reference). In some embodiments, the VH sequence that is used as a starting material or starting point for generating or designing the camelized VHH is a VH sequence from a mammal, for example, the VH sequence of a human being, such as a VH3 sequence. In various embodiments, the camelized VHHs can be obtained in any suitable manner known in the art (i.e., as indicated under points (1)-(8) above) and thus are not strictly limited to polypeptides that have been obtained using a polypeptide that comprises a naturally occurring VH domain as a starting material.

[0617] In various embodiments, both “humanization” and “camelization” can be performed by providing a nucleotide sequence that encodes a naturally occurring V_{H}H domain or VH domain, respectively, and then changing, in a manner known in the art, one or more codons in the nucleotide sequence in such a way that the new nucleotide sequence encodes a “humanized” or “camelized” VHH, respectively. This nucleic acid can then be expressed in a manner known in the art, so as to provide the desired VHH of the invention. Alternatively, based on the amino acid sequence of a naturally occurring V_{H}H domain or VH domain, respectively, the amino acid sequence of the desired humanized or camelized V_{H}H of the invention, respectively, can be designed and then synthesized de novo using techniques for peptide synthesis known in the art. Also, based on the amino acid sequence or nucleotide sequence of a naturally occurring VHH domain or VH domain, respectively, a nucleotide sequence encoding the desired humanized or camelized VHH, respectively, can be designed and then synthesized de novo using techniques for nucleic acid synthesis known in the art, after which the nucleic acid thus obtained can be expressed in a manner known in the art, so as to provide the desired VHH of the invention. Other suitable methods and techniques for obtaining the VHHs of the invention and/or nucleic acids encoding the same, starting from naturally occurring VH sequences or V_{H}H sequences, are known in the art, and may, for example, comprise combining one or more parts of one or more naturally occurring VH sequences (such as one or more FR sequences and/or CDR sequences), one or more parts of one or more naturally occurring V_{H}H sequences (such as one or more FR sequences or CDR sequences), and/or one or more synthetic or semi-synthetic sequences, in a suitable manner, so as to provide a VHH of the invention or a nucleotide sequence or nucleic acid encoding the same.

[0618] Methods for producing the chimeric proteins or chimeric protein complexes of the invention are described herein. For example, DNA sequences encoding the chimeric proteins or chimeric protein complexes of the invention (e.g., DNA sequences encoding the modified signaling agent and the targeting moiety and the linker) can be chemically synthesized using methods known in the art. Synthetic DNA sequences can be ligated to other appropriate nucleotide sequences, including, e.g., expression control sequences, to produce gene expression constructs encoding the desired chimeric proteins or chimeric protein complexes. Accordingly, in various embodiments, the present invention provides for isolated nucleic acids comprising a nucleotide sequence encoding the chimeric protein or chimeric protein complex of the invention.

[0619] Nucleic acids encoding the chimeric protein or chimeric protein complex of the invention can be incorporated (ligated) into expression vectors, which can be introduced into host cells through transfection, transformation, or transduction techniques. For example, nucleic acids encoding the chimeric protein or chimeric protein complex of the invention can be introduced into host cells by retroviral transduction. Illustrative host cells are E. coli cells, Chinese hamster ovary (CHO) cells, human embryonic kidney 293 (HEK 293) cells, Hela cells, baby hamster kidney (BHK) cells, monkey kidney cells (COS), human hepatocellular carcinoma cells (e.g., Hep G2), and myeloma cells. Transformed host cells can be grown under conditions that permit the host cells to express the genes that encode the chimeric protein or chimeric protein complex of the invention. Accordingly, in various embodiments, the present invention provides expression vectors comprising nucleic acids that encode the chimeric protein or chimeric protein complex of the invention. In various embodiments, the present invention additional provides host cells comprising such expression vectors.

[0620] Specific expression and purification conditions will vary depending upon the expression system employed. For example, if a gene is to be expressed in E. coli, it is first cloned into an expression vector by positioning the engineered gene downstream from a suitable bacterial promoter, e.g., Trp or Tac, and a prokaryotic signal sequence. In another example, if the engineered gene is to be expressed in eukaryotic host cells, e.g., CHO cells, it is first inserted into an expression vector containing for example, a suitable eukaryotic promoter, a secretion signal, enhancers, and various introns. The gene construct can be introduced into the host cells using transfection, transformation, or transduction techniques.

[0621] The chimeric protein or chimeric protein complex of the invention can be produced by growing a host cell transfected with an expression vector encoding the chimeric protein or chimeric protein complex under conditions that permit expression of the protein. Following expression, the protein can be harvested and purified using techniques well known in the art, e.g., affinity tags such as glutathione-S-transferase (GST) and histidine tags or by chromatography.

[0622] Accordingly, in various embodiments, the present invention provides for a nucleic acid encoding a chimeric protein or chimeric protein complex of the present invention. In various embodiments, the present invention provides for a host cell comprising a nucleic acid encoding a chimeric protein or chimeric protein complex of the present invention.

[0623] In various embodiments, the present Clec4C binding agent or chimeric protein or chimeric protein complex comprising the same may be expressed in vivo, for instance, in a patient. For example, in various embodiments, the present Clec4C binding agent or chimeric protein or chimeric protein complex comprising the same may be administered in the form of nucleic acid which encodes the present Clec4C binding agent or chimeric proteins or chimeric protein complexes comprising the same. In various embodiments, the nucleic acid is DNA or RNA. In some embodiments, present Clec4C binding agent or chimeric protein or chimeric protein complex comprising the same is encoded by a modified mRNA, i.e. an mRNA comprising one or more modified nucleotides. In some embodiments, the modified mRNA comprises one or modifications found in U.S. Pat. No. 8,278,036, the entire contents of which are hereby incorporated by reference. In some embodiments, the modified mRNA comprises one or more of m5C, m5U, m6A, s2U, ψ, and 2′-O-methyl-U. In some embodiments, the present invention relates to administering a modified mRNA encoding one or more of the present chimeric proteins or chimeric protein complexes. In some embodiments, the present invention relates to gene therapy vectors comprising the same. In some embodiments, the present invention relates to gene therapy methods comprising the same. In various embodiments, the nucleic acid is in the form of an oncolytic virus, e.g. an adenovirus, reovirus, measles, herpes simplex, Newcastle disease virus or vaccinia.

### Fc-Based Chimeric Protein Complexes

[0624] The present technology is based, in part, on the discovery of signaling agents, that are optionally modified to have reduced affinity or activity for one or more of its receptors, and targeting moieties that recognize and bind to a specific target. In some embodiments, one or more signaling agents and one or more targeting moieties are linked and/or conjugated and/or fused to Fc-based chimeric proteins that can pair to form Fc-based chimeric protein complexes. Such Fc-based chimeric protein complexes, surprisingly, have dramatically improved half-lives in vivo, as compared to chimeras lacking an Fc and, especially in the heterodimer configuration as described herein, are particularly amendable to production, purification, and pharmaceutical formulation due to enhanced solubility, stability and other drug-like properties. Accordingly, the present Fc-based chimeric protein complex engineering approach yields agents that are particularly suited for use as therapies.

[0625] In some embodiments, these Fc-based chimeric protein complexes may bind and directly or indirectly recruit immune cells to sites in need of therapeutic action (e.g. a tumor or tumor microenvironment). In some embodiments, the Fc-based chimeric protein complexes enhance tumor antigen presentation for elicitation of effective antitumor immune response. In some embodiments these Fc-based chimeric protein complexes may bind tumor cells, tumor microenvironment-associated cells or stromal targets. In some embodiments. These Fc-based chimeric protein complexes may bind to tissue-specific and/or cell-specific specific markers (e.g. antigens, targets) associated with disease-affected or disease-associated organs, tissues and cells. In some embodiments these Fc-based chimeric protein complexes may bind to more than one target/protein marker/antigen present on the same or different cells. In some embodiments these Fc-based chimeric protein complexes may bind to two or more cell types. In some embodiments these Fc-based chimeric protein complexes may bind to more than one cell type and promote formation of a cell complex (e.g. an immune cell and a tumor cell).

[0626] In some embodiments, the Fc-based chimeric protein complexes modulate antigen presentation. In some embodiments, the Fc-based chimeric protein complexes temper the immune response to avoid or reduce autoimmunity. In some embodiments, the Fc-based chimeric protein complexes provide immunosuppression. In some embodiments, the Fc-based chimeric protein complexes cause an increase a ratio of T_{regs} to CD8+ T cells and/or CD4+ T cells in a patient. In some embodiments, the present methods relate to reduction of auto-reactive T cells in a patient.

[0627] In some embodiments, the Fc-based chimeric protein complexes are a complex of proteins formed, for example, by disulfide bonding and/or ionic pairing. In embodiments, the complex of proteins includes one or more fusion proteins. In some embodiments, the Fc-based chimeric protein complex has a configuration and/or orientation/configuration as shown in any one of FIGS. 10A-F, 11A-H, 12A-H, 13A-D, 14A-F, 15A-J, 16A-D, 17A-F, 18A-J, 19A-F, 20A-L, 21A-L, 22A-F, 23A-L, 24A-L, 25A-J, 26A-J, 27A-F, 28A-F, and 29A-D. In some embodiments, the Fc-based chimeric protein complex has a configuration and/or orientation/configuration as shown in FIG. 16B.

[0628] The present technology provides pharmaceutical compositions comprising the Fc-based chimeric protein complexes and their use in the treatment of various diseases, including, e.g., cancer, autoimmune, neurodegenerative diseases, metabolic diseases, cardiovascular diseases and degenerative diseases.

### Fc Domains

[0629] The fragment crystallizable domain (Fc domain) is the tail region of an antibody that interacts with Fc receptors located on the cell surface of cells that are involved in the immune system, e.g., B lymphocytes, dendritic cells, natural killer cells, macrophages, neutrophils, eosinophils, basophils, and mast cells. In IgG, IgA and IgD antibody isotypes, the Fc domain is composed of two identical protein chains, derived from the second and third constant domains of the antibody's two heavy chains. In IgM and IgE antibody isotypes, the Fc domain contains three heavy chain constant domains (CH domains 2-4) in each polypeptide chain.

[0630] In some embodiments, the Fc-based chimeric protein complex of the present technology include(s) chimeric proteins with Fc domains that promotes formation of such protein complexes. In some embodiments, the Fc domains are from selected from IgG, IgA, IgD, IgM, or IgE. In some embodiments, the Fc domains are from selected from IgG1, IgG2, IgG3, or IgG4.

[0631] In some embodiments, the Fc domains are from selected from human IgG, IgA, IgD, IgM, or IgE. In some embodiments, the Fc domains are from selected from human IgG1, IgG2, IgG3, or IgG4.

[0632] In some embodiments, the Fc domains of the Fc-based chimeric protein complex comprise the CH₂ and CH₃ regions of IgG. In some embodiments, the IgG is human IgG. In some embodiments, the human IgG is selected from IgG1, IgG2, IgG3, or IgG4.

[0633] In some embodiments, the Fc domains comprise one or more mutations. In some embodiments, the mutation(s) to the Fc domains reduces or eliminates the effector function the Fc domains. In some embodiments, the mutated Fc domain has reduced affinity or binding to a target receptor. By way of example, in some embodiments, the mutation to the Fc domains reduces or eliminates the binding of the Fc domains to FcγR. In some embodiments, the FcγR is selected from FcγRI; FcγRIIa, 131 R/R; FcγRIIa, 131 H/H, FcγRIIb; and FcγRIII. In some embodiments, the mutation to the Fc domains reduces or eliminated binding to complement proteins, such as, e.g., Clq. In some embodiments, the mutation to the Fc domains reduces or eliminated binding to both FcγR and complement proteins, such as, e.g., Clq.

[0634] In some embodiments, the Fc domains comprise the LALA mutation to reduce or eliminate the effector function of the Fc domains. By way of example, in some embodiments, the LALA mutation comprises L234A and L235A substitutions in human IgG (e.g., IgG1) (wherein the numbering is based on the commonly used numbering of the CH₂ residues for human IgG1 according to EU convention (PNAS, Edelman et al., 1969; 63 (1) 78-85)).

[0635] In some embodiments, the Fc domains of human IgG comprise a mutation at one or more of L234, L235, K322, D265, P329, and P331 to reduce or eliminate the effector function of the Fc domains. By way of example, in some embodiments, the mutations are selected from L234A, L234F, L235A, L235E, L235Q, K322A, K322Q, D265A, P329G, P329A, P331G, and P331S.

[0636] In some embodiments, the Fc domains comprise the FALA mutation to reduce or eliminate the effector function of the Fc domains. By way of example, in some embodiments, the FALA mutation comprises F234A and L235A substitutions in human IgG4.

[0637] In some embodiments, the Fc domains of human IgG4 comprise a mutation at one or more of F234, L235, K322, D265, and P329 to reduce or eliminate the effector function of the Fc domains. By way of example, in some embodiments, the mutations are selected from F234A, L235A, L235E, L235Q, K322A, K322Q, D265A, P329G, and P329A.

[0638] In some embodiments, the mutation(s) to the Fc domain stabilize a hinge region in the Fc domain. By way of example, in some embodiments, the Fc domain comprises a mutation at S228 of human IgG to stabilize a hinge region. In some embodiments, the mutation is S228P.

[0639] In some embodiments, the mutation(s) to the Fc domain promote chain pairing in the Fc domain. In some embodiments, chain pairing is promoted by ionic pairing (a/k/a charged pairs, ionic bond, or charged residue pair). In some embodiments, the Fc domain comprises a mutation at one more of the following amino acid residues of IgG to promote of ionic pairing: D356, E357, L368, K370, K392, D399, and K409.

[0640] By way of example, in some embodiments, the human IgG Fc domain comprise one of the mutation combinations in Table 1 to promote of ionic pairing.

TABLE 1

| Substitution(s) on one Fc Chain | Substitution(s) on other Fc Chain |
|---|---|
| D356K D399K | K392D K409D |
| E357R L368R | K370D K409D |
| E357R L368K | K370D K409D |
| E357R D399K | K370D K409D |
| E357R | K370D |
| L368R D399K | K392D K409D |
| L368K D399K | K392D K409D |
| L368R D399K | K409D |
| L368K D399K | K409D |
| L368R | K409D |
| L368K | K409D |
| K370D K409D | E357R D399K |
| K370D K409D | E357R L368R |
| K370D K409D | E357R L368K |
| K370D K409D | E357R D399K |
| K370D K409D | E357R L368R |
| K370D K409D | E357R L368K |
| K370D | E357R |
| K370D | E357R |
| K392D K409D | D356K D399K |
| K392D K409D | L368R D399K |
| K392D K409D | L368K D399K |
| K392D K409D | D399K |
| D399K | K392D K409D |
| D399K | K409D |
| K409D | L368R |
| K409D | L368K |
| K409D | L368R D399K |
| K409D | L368K D399K |
| K409D | L368R |
| K409D | L368K |
| K409D | L368R D399K |
| K409D | L368K D399K |
| K409D | D399K |

[0641] In some embodiments, chain pairing of the individual Fc-domains in a chimeric protein complex is promoted by knob-in-hole mutations. In some embodiments, the Fc domain comprises one or more mutations to allow for a knob-in-hole interaction in the Fc domain. In some embodiments, a first Fc chain is engineered to express the “knob” and a second Fc chain is engineered to express the complementary “hole.” By way of example, in some embodiments, human IgG Fc domain comprises the mutations of Table 2 to allow for a knob-in-hole interaction.

TABLE 2

| Substitution(s) on one Fc Chain | Substitution(s) on other Fc Chain |
|---|---|
| T366Y | Y407T |
| T366Y/F405A | T394W/Y407T |
| T366W | Y407A |
| T366W | Y407V |
| T366Y | Y407A |
| T366Y | Y407V |
| T366Y | Y407T |

[0642] In some embodiments, the Fc domains in the Fc-based chimeric protein complexes of the present technology comprise any combination of the above-disclosed mutations. By way of example, in some embodiments, the Fc domain comprises mutations that promote ionic pairing and/or a knob-in-hole interaction. By way of example, in some embodiments, the Fc domain comprises mutations that have one or more of the following properties: promote ionic pairing, induce a knob-in-hole interaction, reduce or eliminate the effector function of the Fc domain, and cause Fc stabilization (e.g. at hinge).

[0643] By way of example, in some embodiments, a human IgG Fc domain comprise mutations disclosed in Table 3, which promote ionic pairing and/or promote a knob-in-hole interaction in the Fc domain.

TABLE 3

| Substitution(s) on one Fc Chain | Substitution(s) on other Fc Chain |
|---|---|
| T366W K370D | E357R Y407A |
| T366W K370D | E357R Y407V |
| T366W K409D | L368R Y407A |
| T366W K409D | L368R Y407V |
| T366W K409D | L368K Y407A |
| T366W K409D | L368K Y407V |
| T366W K409D | L368R D399K Y407A |
| T366W K409D | L368R D399K Y407V |
| T366W K409D | L368K D399K Y407A |
| T366W K409D | L368K D399K Y407V |
| T366W K409D | D399K Y407A |
| T366W K409D | D399K Y407V |
| T366W K392D K409D | D399K Y407A |
| T366W K392D K409D | D399K Y407V |
| T366W K392D K409D | D356K D399K Y407A |
| T366W K392D K409D | D356K D399K Y407V |
| T366W K370D K409D | E357R D399K Y407A |
| T366W K370D K409D | E357R D399K Y407V |
| T366W K370D K409D | E357R L368R Y407A |
| T366W K370D K409D | E357R L368R Y407V |
| T366W K370D K409D | E357R L368K Y407A |
| T366W K370D K409D | E357R L368K Y407V |
| T366W K392D K409D | L368R D399K Y407A |
| T366W K392D K409D | L368R D399K Y407V |
| T366W K392D K409D | L368K D399K Y407A |
| T366W K392D K409D | L368K D399K Y407V |
| E357R T366W | K370D Y407A |
| E357R T366W | K370D Y407V |
| T366W L368R | Y407A K409D |
| T366W L368R | Y407V K409D |
| T366W L368K | Y407A K409D |
| T366W L368K | Y407V K409D |
| T366W L368R D399K | Y407A K409D |
| T366W L368R D399K | Y407V K409D |
| T366W L368K D399K | Y407A K409D |
| T366W L368K D399K | Y407V K409D |
| T366W D399K | Y407A K409D |
| T366W D399K | Y407V K409D |
| 1366W D399K | K392D Y407A K409D |
| T366W D399K | K392D Y407V K409D |
| T366W D356K D399K | K392D Y407A K409D |
| T366W D356K D399K | K392D Y407V K409D |
| E357R T366W D399K | K370D Y407A K409D |
| E357R T366W D399K | K370D Y407V K409D |
| E357R T366W L368R | K370D Y407A K409D |
| E357R T366W L368R | K370D Y407V K409D |
| E357R T366W L368K | K370D Y407A K409D |
| E357R T366W L368K | K370D Y407V K409D |
| T366W L368R D399K | K392D Y407A K409D |
| T366W L368R D399K | K392D Y407V K409D |
| T366W L368K D399K | K392D Y407A K409D |

[0644] By way of example, in some embodiments, human IgG Fc domains comprise mutations disclosed in Table 4, which promote ionic pairing, promote a knob-in-hole interaction, or a combination thereof ofs the Fc domains. In embodiments, the “Chain 1” and “Chain 2” of Table 4 can be interchanged (e.g. Chain 1 can have Y407T and Chain 2 can have T366Y).

TABLE 4

| Chain 1 mutation | Chain 2 mutation | Reference | IgG |
|---|---|---|---|
| T366Y | Y407T | Ridgway et al., 1996 Protein | IgG1 |
| | | Engineering, Design and Selection, | |
| | | Volume 9, Issue 7, 1 Jul. 1996, Pages | |
| | | 617-62 | |
| T366Y/F405A | T394W/Y407T | Ridgway et al., 1996 Protein | IgG1 |
| | | Engineering, Design and Selection, | |
| | | Volume 9, Issue 7, 1 Jul. 1996, Pages | |
| | | 617-62 | |
| T366W | Y407A | Atwell et al., 1997 JMB | IgG1 |
| | | Volume 270, Issue 1, 4 Jul. 1997, | |
| | | Pages 26-35 | |
| T366W | T366S/L368V/Y407A | Atwell et al., 1997 JMB | IgG1 |
| | | Volume 270, Issue 1, 4 Jul. 1997, | |
| | | Pages 26-35 | |
| T366W | L368A/Y407A | Atwell et al., 1997 JMB | IgG1 |
| | | Volume 270, Issue 1, 4 Jul. 1997, | |
| | | Pages 26-35 | |
| T366W | T366S/L368A/Y407A | Atwell et al., 1997 JMB | IgG1 |
| | | Volume 270, Issue 1, 4 Jul. 1997, | |
| | | Pages 26-35 | |
| T366W | T366S/L368G/Y407V | Atwell et al., 1997 JMB | IgG1 |
| | | Volume 270, Issue 1, 4 Jul. 1997, | |
| | | Pages 26-35 | |
| T366W/D399C | T366S/L368A/K392C/Y407V | Merchant et al., 1998 Nature | IgG1 |
| | | Biotechnology volume 16, pages 677- | |
| | | 681 (1998) | |
| T366W/K392C | T366S/L368A/D399C/Y407V | Merchant et al., 1998 Nature | IgG1 |
| | | Biotechnology volume 16, pages 677- | |
| | | 681 (1998) | |
| S354C/T366W | Y349C/T366S/L368A/Y407V | Merchant et al., 1998 Nature | IgG1 |
| | | Biotechnology volume 16, pages 677- | |
| | | 681 (1998) | |
| Y349C/T366W | S354C/T366S/L368A/Y407V | Merchant et al., 1998 Nature | IgG1 |
| | | Biotechnology volume 16, pages 677- | |
| | | 681 (1998) | |
| E356C/T366W | Y349C/T366S/L368A/Y407V | Merchant et al., 1998 Nature | IgG1 |
| | | Biotechnology volume 16, pages 677- | |
| | | 681 (1998) | |
| Y349C/T366W | E356C/T366S/L368A/Y407V | Merchant et al., 1998 Nature | IgG1 |
| | | Biotechnology volume 16, pages 677- | |
| | | 681 (1998) | |
| E357C/T366W | Y349C/T366S/L368A/Y407V | Merchant et al., 1998 Nature | IgG1 |
| | | Biotechnology volume 16, pages 677- | |
| | | 681 (1998) | |
| Y349C/T366W | E357C/T366S/L368A/Y407V | Merchant et al., 1998 Nature | IgG1 |
| | | Biotechnology volume 16, pages 677- | |
| | | 681 (1998) | |
| D339R | K409E | Gunasekaran et al., 2010 The Journal of | IgG1 |
| | | Biological Chemistry 285, 19637-19646. | |
| D339K | K409E | Gunasekaran et al., 2010 The Journal of | IgG1 |
| | | Biological Chemistry 285, 19637-19646. | |
| D339R | K409D | Gunasekaran et al., 2010 The Journal of | IgG1 |
| | | Biological Chemistry 285, 19637-19646. | |
| D339K | K409D | Gunasekaran et al., 2010 The Journal of | IgG1 |
| | | Biological Chemistry 285, 19637-19646. | |
| D339K | K360D/K409E | Gunasekaran et al., 2010 The Journal of | IgG1 |
| | | Biological Chemistry 285, 19637-19646. | |
| D339K | K392D/K409E | Gunasekaran et al., 2010 The Journal of | IgG1 |
| | | Biological Chemistry 285, 19637-19646. | |
| D339K/E356K | K392D/K409E | Gunasekaran et al., 2010 The Journal of | IgG1 |
| | | Biological Chemistry 285, 19637-19646. | |
| D339K/E357K | K392D/K409E | Gunasekaran et al., 2010 The Journal of | IgG1 |
| | | Biological Chemistry 285, 19637-19646. | |
| D339K/E356K | K409E/K439D | Gunasekaran et al., 2010 The Journal of | IgG1 |
| | | Biological Chemistry 285, 19637-19646. | |
| D339K/E357K | K370D/K409E | Gunasekaran et al., 2010 The Journal of | IgG1 |
| | | Biological Chemistry 285, 19637-19646. | |
| D339K/E356K/E357K | K370D/K392D/K409E | Gunasekaran et al., 2010 The Journal of | IgG1 |
| | | Biological Chemistry 285, 19637-19646. | |
| S364H/F405A | Y349T/T394F | Moore et al., 2011 mAbs, 3: 6, 546-557 | IgG1 |
| S364H/T394F | Y349T/F405A | Moore et al., 2011 mAbs, 3: 6, 546-557 | IgG1 |
| D221R/P228R/K409R | D221E/P228E/L368E | Strop et al., 2012 JMB Volume 420, | IgG1 |
| | | Issue 3, 13 Jul. 2012, Pages 204-219 | |
| C223R/E225R/P228R/K409R | C223E/P228E/L368E | Strop et al., 2012 JMB Volume 420, | IgG2 |
| | | Issue 3, 13 Jul. 2012, Pages 204-219 | |
| F405L | K409R | Labrijn et al., 2013 PNAS Mar. 26, | IgG1 |
| | | 2013. 110 (13) 5145-5150 | |
| F405A/Y407V | T394W | Von Kreudenstein et al., 2013 mAbs | IgG1 |
| | | Volume 5, 2013 - Issue 5, pp. 644-654 | |
| F405A/Y407V | T366I/T394W | Von Kreudenstein et al., 2013 mAbs | IgG1 |
| | | Volume 5, 2013 - Issue 5, pp.644-654 | |
| F405A/Y407V | T366L/T394W | Von Kreudenstein et al., 2013 mAbs | IgG1 |
| | | Volume 5, 2013 - Issue 5, pp. 644-654 | |
| F405A/Y407V | T366L/K392M/T394W | Von Kreudenstein et al., 2013 mAbs | IgG1 |
| | | Volume 5, 2013 - Issue 5, pp. 644-654 | |
| L351Y/F405A/Y407V | T366L/K392M/T394W | Von Kreudenstein et al., 2013 mAbs | IgG1 |
| | | Volume 5, 2013 - Issue 5, pp. 644-654 | |
| T350V/L351Y/F405A/Y407V | T350V/T366L/K392M/T394W | Von Kreudenstein et al., 2013 mAbs | IgG1 |
| | | Volume 5, 2013 - Issue 5, pp. 644-654 | |
| T350V/L351Y/F405A/Y407V | T350V/T366L/K392L/T394W | Von Kreudenstein et al., 2013 mAbs | IgG1 |
| | | Volume 5, 2013 - Issue 5, pp. 644-654 | |
| K409W | D339V/F405T | Choi et al., 2013 PNAS Jan. 2, | IgG1 |
| | | 2013. 110 (1) 270-275 | |
| K360E | Q347R | Choi et al., 2013 PNAS Jan. 2, | IgG1 |
| | | 2013. 110 (1) 270-275 | |
| K360E/K409W | D339V/Q347R/F405T | Choi et al., 2013 PNAS Jan. 2, | IgG1 |
| | | 2013. 110 (1) 270-275 | |
| Y349C/K360E/K409W | D339V/Q347R/S354C/F405T | Choi et al., 2013 PNAS Jan. 2, | IgG1 |
| | | 2013. 110 (1) 270-275 | |
| K392A/K409D | E356K/D399K | Leaver-Fey et al., 2016 Structure | IgG1 |
| | | Volume 24, Issue 4, 5 April 2016, Pages | |
| | | 641-651 | |
| T366W | T366S/L358A/Y407A | Leaver-Fey et al., 2016 Structure | IgG1 |
| | | Volume 24, Issue 4, 5 April 2016, Pages | |
| | | 641-651 | |
| D339M/Y407A | T336V/K409V | Leaver-Fey et al., 2016 Structure | IgG1 |
| | | Volume 24, Issue 4, 5 April 2016, Pages | |
| | | 641-651 | |
| D339M/K360D/Y407A | T336V/E345R/Q347R/K409V | Leaver-Fey et al., 2016 Structure | IgG1 |
| | | Volume 24, Issue 4, 5 April 2016, Pages | |
| | | 641-651 | |
| Y349S/T366V/K370Y/K409V | E357D/S364Q/Y407A | Leaver-Fey et al., 2016 Structure | IgG1 |
| | | Volume 24, Issue 4, 5 April 2016, Pages | |
| | | 641-651 | |
| Y349S/T366M/K370Y/K409V | E356G/E357D/S364Q/Y407A | Leaver-Fey et al., 2016 Structure | IgG1 |
| | | Volume 24, Issue 4, 5 April 2016, Pages | |
| | | 641-651 | |
| Y349S/T366M/K370Y/K409V | E357D/S364R/Y407A | Leaver-Fey et al., 2016 Structure | IgG1 |
| | | Volume 24, Issue 4, 5 April 2016, Pages | |
| | | 641-651 | |

And any combination as described in Tables 1-3 of US20150284475A1

[0645] By way of example, in some embodiments, a human IgG Fc domains comprise mutations disclosed in Table 5, which reduce or eliminate FcγR and/or complement binding in the Fc domain. In embodiments, the table 5 mutations are in both chains.

TABLE 5

| Chain 1 mutation | Reference | IgG |
|---|---|---|
| L234A/L235A | Alegre et al., 1994 | IgG1 |
| | Transplantation 57: 1537- | |
| | 1543 | |
| F234A/L235A | Alegre et al., 1994 | IgG4 |
| | Transplantation 57: 1537- | |
| | 1543 | |
| L235E | Morgan et al., 1995 | IgG1 |
| | Immunology. 1995 October | |
| | 86(2): 319-324. | |
| L235E | Morgan et al., 1995 | IgG4 |
| | Immunology. 1995 October | |
| | 86(2): 319-324. | |
| L235A | Morgan et al., 1995 | IgG1 |
| | Immunology. 1995 October | |
| | 86(2): 319-324. | |
| G237A | Morgan et al., 1995 | IgG1 |
| | Immunology. 1995 October | |
| | 86(2): 319-324. | |
| N297H | Tao and Morrison, | IgG1 |
| | J. Immunol. 1989; 143: | |
| | 2595-2601 | |
| N297Q | Tao and Morrison, | IgG1 |
| | J. Immunol. 1989; 143: | |
| | 2595-2601 | |
| N297K | Tao and Morrison, | IgG3 |
| | J. Immunol. 1989; 143: | |
| | 2595-2601 | |
| N297Q | Tao and Morrison, | IgG3 |
| | J. Immunol. 1989; 143: | |
| | 2595-2601 | |
| D265A | Idusogie et al., 2000 J | IgG1 |
| | Immunol Apr. 15, 2000, 164 | |
| | (8) 4178-4184 | |
| D270A, V, K | Idusogie et al., 2000 J | IgG1 |
| | Immunol Apr. 15, 2000, 164 | |
| | (8) 4178-4184 | |
| K322A, L, M, D, E | Idusogie et al., 2000 J | IgG1 |
| | Immunol Apr. 15, 2000, 164 | |
| | (8) 4178-4184 | |
| P329A, X | Idusogie et al., 2000 J | IgG1 |
| | Immunol Apr. 15, 2000, 164 | |
| | (8) 4178-4184 | |
| P331A, S, G, X | Idusogie et al., 2000 J | IgG1 |
| | Immunol Apr. 15, 2000, 164 | |
| | (8) 4178-4184 | |
| D265A | Idusogie et al., 2000 J | IgG1 |
| | Immunol Apr. 15, 2000, 164 | |
| | (8) 4178-4184 | |
| L234A | Hezareh et al., 2001 J. Virol. | IgG1 |
| | December 2001 vol. 75 no. | |
| | 24 12161-12168 | |
| L234A/L235A | Hezareh et al., 2001 J. Virol. | IgG1 |
| | December 2001 vol. 75 no. | |
| | 24 12161-12168 | |
| L234F/L235E/P331S | Oganesyan et al., 2008 Acta | IgG1 |
| | Cryst. (2008). D64, 700-704 | |
| H268Q/V309L/A330S/P331S | An et al., 2009 mAbs | IgG1 |
| | Volume 1, 2009 - Issue 6, | |
| | pp. 572-579 | |
| G236R/L328R | Moore et al., 2011 mAbs | IgG1 |
| | Volume 3, 2011 - Issue 6, | |
| | pp. 546-557 | |
| N297G | Couch et al., 2013 Sci. | IgG1 |
| | Transl. Med., 5 (2013) | |
| | 183ra57, 1-12 | |
| N297G/D265A | Couch et al., 2013 Sci. | IgG1 |
| | Transl. Med., 5 (2013) | |
| | 183ra57, 1-12 | |
| V234A/G237A/P328S/H268A/ | Vafa et al., 2014 Methods | IgG2 |
| V309L/A330S/P331S | Volume 65, Issue 1, 1 | |
| | Jan. 2014, Pages 114-126 | |
| L234A/L235A/P329G | Lo et al., 2016 The Journal | IgG1 |
| | of Biological Chemistry | |
| | 292, 3900-3908 | |
| N297D | Schlothauer et al., 2016 | IgG1 |
| | Protein Engineering, Design | |
| | and Selection, Volume 29, | |
| | Issue 10, 1 Oct. 2016, | |
| | Pages 457-466 | |
| S228P/L235E | Schlothauer et al., 2016 | IgG4 |
| | Protein Engineering, Design | |
| | and Selection, Volume 29, | |
| | Issue 10, 1 Oct. 2016, | |
| | Pages 457-466 | |
| S228P/L235E/P329G | Schlothauer et al., 2016 | IgG4 |
| | Protein Engineering, Design | |
| | and Selection, Volume 29, | |
| | Issue 10, 1 Oct. 2016, | |
| | Pages 457-466 | |
| L234F/L235A/K322Q | Borrok et al., 2017 J Pharm | IgG1 |
| | Sci April 2017 Volume 106, | |
| | Issue 4, Pages 1008-1017 | |
| L234F/L235Q/P331G | Borrok et al., 2017 J Pharm | IgG1 |
| | Sci April 2017 Volume 106, | |
| | Issue 4, Pages 1008-1017 | |
| L234F/L235Q/K322Q | Borrok et al., 2017 J Pharm | IgG1 |
| | Sci April 2017 Volume 106, | |
| | Issue 4, Pages 1008-1017 | |
| L234A/L235A/G237A/P328S/ | Tam et al., 2017 Open Access | IgG1 |
| H268A/A330S/P331S | Antibodies 2017, 6(3), 12; | |
| | doi: 10.3390/antib6030012 | |
| S228P/F234A/L235A | Tam et al., 2017 Open Access | IgG4 |
| | Antibodies 2017, 6(3), 12; | |
| | doi: 10.3390/antib6030012 | |
| S228P/F234A/L235A/G237A/ | Tam et al., 2017 Open Access | IgG4 |
| P238S | Antibodies 2017, 6(3), 12; | |
| | doi: 10.3390/antib6030012 | |
| S228P/F234A/L235A/G236/ | Tam et al., 2017 Open Access | IgG4 |
| G237A/P238S | Antibodies 2017, 6(3), 12; | |
| | doi: 10.3390/antib6030012 | |

[0646] In some embodiments, the Fc domains in the Fc-based chimeric protein complexes of the present technology are homodimeric, i.e., the Fc domain in the chimeric protein complex comprises two identical protein chains.

[0647] In some embodiments, the Fc domains in the Fc-based chimeric protein complexes of the present technology are heterodimeric, i.e., the Fc domain in the chimeric protein complex comprises two non-identical protein chains.

[0648] In some embodiments, heterodimeric Fc domains are engineered using ionic pairing and/or knob-in-hole mutations described herein. In some embodiments, the heterodimeric Fc-based chimeric protein complexes have a trans orientation/configuration. In a trans orientation/configuration, the targeting moiety and signaling agent are, in embodiments, not found on the same polypeptide chain in the present Fc-based chimeric protein complexes. In some embodiments, the signaling agent and targeting moiety are on the same end (N-terminus or C-terminus) of the Fc domain. In some embodiments, the signaling agent and targeting moiety are on different ends (N-terminus or C-terminus) of the Fc domain.

[0649] In some embodiments, heterodimeric Fc domains are engineered using ionic pairing and/or knob-in-hole mutations described herein. In some embodiments, the heterodimeric Fc-based chimeric protein complexes have a trans orientation.

[0650] In a trans orientation, the targeting moiety and signaling agent are, in embodiments, not found on the same polypeptide chain in the present Fc-based chimeric protein complexes. In a trans orientation, the targeting moiety and signaling agent are, in embodiments, found on separate polypeptide chains in the Fc-based chimeric protein complexes. In a cis orientation, the targeting moiety and signaling agent are, in embodiments, found on the same polypeptide chain in the Fc-based chimeric protein complexes.

[0651] In some embodiments, where more than one targeting moiety is present in the heterodimeric protein complexes described herein, one targeting moiety may be in trans orientation (relative to the signaling agent), whereas another targeting moiety may be in cis orientation (relative to the signaling agent). In some embodiments, the signaling agent and target moiety are on the same ends/sides (N-terminal or C-terminal ends) of an Fc domain. In some embodiments, the signaling agent and targeting moiety are on different sides/ends of an Fc domain (N-terminal and C-terminal ends).

[0652] In some embodiments, where more than one targeting moiety is present in the heterodimeric protein complexes described herein, the targeting moieties may be found on the same Fc chain or on two different Fc chains in the heterodimeric protein complex (in the latter case the targeting moieties would be in trans relative to each other, as they are on different Fc chains). In some embodiments, where more than one targeting moiety is present on the same Fc chain, the targeting moieties may be on the same or different sides/ends of an Fc chain (N-terminal or/and C-terminal ends).

[0653] In some embodiments, where more than one signaling agent is present in the heterodimeric protein complexes described herein, the signaling agents may be found on the same Fc chain or on two different Fc chains in the heterodimeric protein complex (in the latter case the signaling agents would be in trans relative to each other, as they are on different Fc chains). In some embodiments, where more than one signaling agent is present on the same Fc chain, the signaling agents may be on the same or different sides/ends of an Fc chain (N-terminal or/and C-terminal ends).

[0654] In some embodiments, where more than one signaling agent is present in the heterodimeric protein complexes described herein, one signaling agent may be in trans orientation (as relates to the targeting moiety), whereas another signaling agent may be in cis orientation (as relates to the targeting moiety).

[0655] In some embodiments, the Fc domains include or start with the core hinge region of wild-type human IgG1, which contains the sequence Cys-Pro-Pro-Cys (SEQ ID NO: 1457). In some embodiments, the Fc domains also include the upper hinge, or parts thereof (e.g., DKTHTCPPC (SEQ ID NO: 1458; see WO2009053368), EPKSCDKTHTCPPC (SEQ ID NO: 1459), or EPKSSDKTHTCPPC (SEQ ID NO: 1460; see Lo et al., Protein Engineering vol. 11 no. 6 pp. 495-500, 1998).

### Fc-Based Chimeric Protein Complexes

[0656] In embodiments, the Fc-based chimeric protein complexes of the present technology comprise at least one Fc domain disclosed herein, at least one signaling agent (SA) disclosed herein, and at least one targeting moiety (TM) disclosed herein.

[0657] It is understood that, the present Fc-based chimeric protein complexes may encompass a complex of two fusion proteins.

[0658] In some embodiments, the Fc-based chimeric protein complex is heterodimeric. In some embodiments, the heterodimeric Fc-based chimeric protein complex has a trans orientation/configuration. In some embodiments, the heterodimeric Fc-based chimeric protein complex has a cis orientation/configuration. In some embodiments, the heterodimeric Fc-based chimeric protein complex does not comprise the signaling agent and targeting moiety on a single polypeptide. In some embodiments, the signaling agent and targeting moiety are on the same end (N-terminus or C-terminus) of the Fc domain or the Fc chains thereof. In some embodiments, the signaling agent and targeting moiety are on different ends (N-terminus or C-terminus) of the Fc domain or the Fc chains thereof.

[0659] In some embodiments, the Fc-based chimeric protein has an improved in vivo half-life relative to a chimeric protein lacking an Fc or a chimeric protein which is not a heterodimeric complex. In some embodiments, the Fc-based chimeric protein has an improved solubility, stability and other pharmacological properties relative to a chimeric protein lacking an Fc or a chimeric protein which is not a heterodimeric complex.

[0660] Heterodimeric Fc-based chimeric protein complexes are composed of two different polypeptides. In embodiments described herein, the targeting domain is on a different polypeptide than the signaling agent and accordingly, proteins that contain only one targeting domain copy, and also only one signaling agent copy can be made (this provides a configuration in which potential interference with desired properties can be controlled). Further, in embodiments, one targeting domain (e.g. VHH) only can avoid cross-linking of the antigen on the cell surface (which could elicit undesired effects in some cases) Further, in embodiments, one signaling agent may alleviate molecular “crowding” and potential interference with avidity mediated restoration of effector function in dependence of the targeting domain. Further, in embodiments, heterodimeric Fc-based chimeric protein complexes can have two targeting moieties and these can be placed on the two different polypeptides. For instance, in embodiments, the C-terminus of both targeting moieties (e.g. VHHs) can be masked to avoid potential autoantibodies or pre-existing antibodies (e.g. VHH autoantibodies or pre-existing antibodies). Further, in embodiments, heterodimeric Fc-based chimeric protein complexes, e.g. with the targeting domain on a different polypeptide than the signaling agent (e.g. wild type signaling agent), may favor “cross-linking” of two cell types (e.g. a tumor cell and an immune cell). Further, in embodiments, heterodimeric Fc-based chimeric protein complexes can have two signaling agents, each on different polypeptides to allow more complex effector responses (e.g. with any two of the signaling agents described herein, by way of illustration IFN alpha2 and TNF).

[0661] Further, in embodiments, heterodimeric Fc-based chimeric protein complexes, e.g. with the targeting domain on a different polypeptide than the signaling agent, combinatorial diversity of targeting moiety and signaling agent is provided in a practical manner. For instance, in embodiments, polypeptides with any of the targeting moieties described herein can be combined “off the shelf” with polypeptides with any of the signaling agents described herein to allow rapid generation of various combinations of targeting moieties and signaling agents in single Fc-based chimeric protein complexes.

[0662] In some embodiments, the Fc-based chimeric protein complex comprises one or more linkers. In some embodiments, the Fc-based chimeric protein complex includes a linker that connects the Fc domain, signaling agent(s) and targeting moiety (ies). In some embodiments, the Fc-based chimeric protein complex includes a linker that connects each signaling agent and targeting moiety (or, if more than one targeting moiety, a signaling agent to one of the targeting moieties). In some embodiments, the Fc-based chimeric protein complex includes a linker that connects each signaling agent to the Fc domain. In some embodiments, the Fc-based chimeric protein complex includes a linker that connects each targeting moiety to the Fc domain. In some embodiments, the Fc-based chimeric protein complex includes a linker that connects a targeting moiety to another targeting moiety. In some embodiments, the Fc-based chimeric protein complex includes a linker that connects a signaling agent to another signaling agent.

[0663] In some embodiments, an Fc-based chimeric protein complex comprises two or more targeting moieties. In such embodiments, the targeting moieties can be the same targeting moiety or they can be different targeting moieties. In some embodiments, an Fc-based chimeric protein complex comprises two or more signaling agents. In such embodiments, the signaling agents can be the same targeting moiety or they can be different targeting moieties.

[0664] By way of example, in some embodiments, the Fc-based chimeric protein complex comprise an Fc domain, at least two signaling agents (SA), and at least two targeting moieties (TM), wherein the Fc domain, signaling agents, and targeting moieties are selected from any of the Fc domains, signaling agents, and targeting moieties disclosed herein. In some embodiments, the Fc domain is homodimeric.

[0665] In various embodiments, the Fc-based chimeric protein complex takes the form of any of the schematics of FIGS. 10A-F.

[0666] In various embodiments, the Fc-based chimeric protein complex takes the form of any of the schematics of FIGS. 11A-H.

[0667] In various embodiments, the Fc-based chimeric protein complex takes the form of any of the schematics of FIGS. 12A-H.

[0668] In various embodiments, the Fc-based chimeric protein complex takes the form of any of the schematics of FIGS. 13A-D.

[0669] In various embodiments, the Fc-based chimeric protein complex takes the form of any of the schematics of FIGS. 14A-F.

[0670] In various embodiments, the Fc-based chimeric protein complex takes the form of any of the schematics of FIGS. 15A-J.

[0671] In various embodiments, the Fc-based chimeric protein complex takes the form of any of the schematics of FIGS. 16A-D.

[0672] In various embodiments, the Fc-based chimeric protein complex takes the form of any of the schematics of FIGS. 17A-F.

[0673] In various embodiments, the Fc-based chimeric protein complex takes the form of any of the schematics of FIGS. 18A-J.

[0674] In various embodiments, the Fc-based chimeric protein complex takes the form of any of the schematics of FIGS. 19A-F.

[0675] In various embodiments, the Fc-based chimeric protein complex takes the form of any of the schematics of FIGS. 20A-L.

[0676] In various embodiments, the Fc-based chimeric protein complex takes the form of any of the schematics of FIGS. 21A-L.

[0677] In various embodiments, the Fc-based chimeric protein complex takes the form of any of the schematics of FIGS. 22A-F.

[0678] In various embodiments, the Fc-based chimeric protein complex takes the form of any of the schematics of FIGS. 23A-L.

[0679] In various embodiments, the Fc-based chimeric protein complex takes the form of any of the schematics of FIGS. 24A-L.

[0680] In various embodiments, the Fc-based chimeric protein complex takes the form of any of the schematics of FIGS. 25A-J.

[0681] In various embodiments, the Fc-based chimeric protein complex takes the form of any of the schematics of FIGS. 26A-J.

[0682] In various embodiments, the Fc-based chimeric protein complex takes the form of any of the schematics of FIGS. 27A-F.

[0683] In various embodiments, the Fc-based chimeric protein complex takes the form of any of the schematics of FIGS. 28A-F.

[0684] In various embodiments, the Fc-based chimeric protein complex takes the form of any of the schematics of FIGS. 29A-E.

[0685] In some embodiments, the signaling agents are linked to the targeting moieties and the targeting moieties are linked to the Fc domain on the same terminus (see FIGS. 10A-F). In some embodiments, the Fc domain is homodimeric.

[0686] In some embodiments, the signaling agents and targeting moieties are linked to the Fc domain, wherein the targeting moieties and signaling agents are linked on the same terminus (see FIGS. 10A-F). In some embodiments, the Fc domain is homodimeric.

[0687] In some embodiments, the targeting moieties are linked to signaling agents and the signaling agents are linked to the Fc domain on the same terminus (see FIGS. 10A-F). In some embodiments, the Fc domain is homodimeric.

[0688] In some embodiments, the homodimeric Fc-based chimeric protein complex has two or more targeting moieties. In some embodiments, there are four targeting moieties and two signaling agents, the targeting moieties are linked to the Fc domain and the signaling agents are linked to targeting moieties on the same terminus (see FIGS. 11A-H). In some embodiments, the Fc domain is homodimeric. In some embodiments, where there are four targeting moieties and two signaling agents, two targeting moieties are linked to the Fc domain and two targeting moieties are linked to the signaling agents, which are linked to the Fc domain on the same terminus (see FIGS. 11A-H). In some embodiments, the Fc domain is homodimeric. In some embodiments, where there are four targeting moieties and two signaling agents, two targeting moieties are linked to each other and one of the targeting moieties of from each pair is linked to the Fc domain on the same terminus and the signaling agents are linked to the Fc domain on the same terminus (see FIGS. 11A-H). In some embodiments, the Fc domain is homodimeric. In some embodiments, where there are four targeting moieties and two signaling agents, two targeting moieties are linked to each other, wherein one of the targeting moieties of from each pair is linked to a signaling agent and the other targeting moiety of the pair is linked the Fc domain, wherein the targeting moieties linked to the Fc domain are linked on the same terminus (see FIGS. 11A-H). In some embodiments, the Fc domain is homodimeric.

[0689] In some embodiments, the homodimeric Fc-based chimeric protein complex has two or more signaling agents. In some embodiments, where there are four signaling agents and two targeting moieties, two signaling agents are linked to each other and one of the signaling agents of from pair is linked to the Fc domain on the same terminus and the targeting moieties are linked to the Fc domain on the same terminus (see FIGS. 12A-H). In some embodiments, the Fc domain is homodimeric. In some embodiments, where there are four signaling agents and two targeting moieties, two signaling agents are linked to the Fc domain one the same terminus and two of the signaling agents are each linked to a targeting moiety, wherein the targeting moieties are linked to the Fc domain at the same terminus (see FIGS. 12A-H). In some embodiments, the Fc domain is homodimeric. In some embodiments, where there are four signaling agents and two targeting moieties, two signaling agents are linked to each other and one of the signaling agents of from pair is linked to a targeting moiety and the targeting moieties are linked to the Fc domain on the same terminus (see FIGS. 12A-H). In some embodiments, the Fc domain is homodimeric.

[0690] By way of example, in some embodiments, the Fc-based chimeric protein complex comprise an Fc domain, wherein the Fc domain comprises ionic pairing mutation(s) and/or knob-in-hole mutation(s), at least one signaling agent, and at least one targeting moiety, wherein the ionic pairing motif and/or a knob-in-hole motif, signaling agent, and targeting moiety are selected from any of the ionic pairing motif and/or a knob-in-hole motif, signaling agents, and targeting moieties disclosed herein. In some embodiments, the Fc domain is heterodimeric. In some embodiments, the Fc domain comprises a mutation that reduces or eliminates its effector function.

[0691] In some embodiments, the signaling agent is linked to the targeting moiety, which is linked to the Fc domain (see FIGS. 19A-F and 22A-F). In some embodiments, the targeting moiety is linked to the signaling agent, which is linked to the Fc domain (see FIGS. 19A-F and 22A-F). In some embodiments, the Fc domain is heterodimeric. In some embodiments, the Fc domain comprises a mutation that reduces or eliminates its effector function.

[0692] In some embodiments, the signaling agent and targeting moiety are linked to the Fc domain (see FIGS. 13A-D, 16A-D, 19A-F, and 22A-F). In some embodiments, the targeting moiety and the signaling agent are linked to different Fc chains on the same terminus (see FIGS. 13A-D and 16A-D). In some embodiments, the targeting moiety and the signaling agent are linked to different Fc chains on different termini (see FIGS. 13A-D and 16A-D). In some embodiments, the targeting moiety and the signaling agent are linked to the same Fc chain (see FIGS. 19A-F and 22A-F). In some embodiments, the Fc domain is heterodimeric. In some embodiments, the Fc domain comprises a mutation that reduces or eliminates its effector function.

[0693] In some embodiments, where there are one signaling agent and two targeting moieties, the signaling agent is linked to the Fc domain and two targeting moieties can be: 1) linked to each other with one of the targeting moieties linked to the Fc domain; or 2) each linked to the Fc domain (see FIGS. 14A-F, 17A-F, 20A-L, 23A-L, 25A-J, and 26A-J). In some embodiments, the targeting moieties are linked on one Fc chain and the signaling agent is on the other Fc chain (see FIGS. 14A-F and 17A-F). In some embodiments, the paired targeting moieties and the signaling agent are linked to the same Fc chain (see FIGS. 20A-L and 23A-L). In some embodiments, a targeting moiety is linked to the Fc domain and the other targeting moiety is linked to the signaling agent, and the paired targeting moiety is linked to the Fc domain (see FIGS. 20A-L, 23A-L, 25A-J, and 26A-J). In some embodiments, the unpaired targeting moiety and paired targeting moiety are linked to the same Fc chain (see FIGS. 20A-L and 23A-L). In some embodiments, the unpaired targeting moiety and paired targeting moiety are linked to different Fc chains (see FIGS. 25A-J and 26A-J). In some embodiments, the unpaired targeting moiety and paired targeting moiety are linked on the same terminus (see FIGS. 25A-J and 26A-J). In some embodiments, the Fc domain is heterodimeric. In some embodiments, the Fc domain comprises a mutation that reduces or eliminates its effector function.

[0694] In some embodiments, where there are one signaling agent and two targeting moieties, a targeting moiety is linked to the signaling agent, which is linked to the Fc domain, and the unpaired targeting moiety is linked the Fc domain (see FIGS. 20A-L, 23A-L, 25A-J, and 26A-J). In some embodiments, the paired signaling agent and unpaired targeting moiety are linked to the same Fc chain (see FIGS. 20A-L and 23A-L). In some embodiments, the paired signaling agent and unpaired targeting moiety are linked to different Fc chains (see FIGS. 25A-J and 26A-J). In some embodiments, the paired signaling agent and unpaired targeting moiety are linked on the same terminus (see FIGS. 25A-J and 26A-J). In some embodiments, the Fc domain is heterodimeric. In some embodiments, the Fc domain comprises a mutation that reduces or eliminates its effector function.

[0695] In some embodiments, where there are one signaling agent and two targeting moieties, the targeting moieties are linked together and the signaling agent is linked to one of the paired targeting moieties, wherein the targeting moiety not linked to the signaling agent is linked to the Fc domain (see FIGS. 20A-L and 23A-L). In some embodiments, the Fc domain is heterodimeric. In some embodiments, the Fc domain comprises a mutation that reduces or eliminates its effector function.

[0696] In some embodiments, where there are one signaling agent and two targeting moieties, the targeting moieties are linked together and the signaling agent is linked to one of the paired targeting moieties, wherein the signaling agent is linked to the Fc domain (see FIGS. 20A-L and 23A-L). In some embodiments, the Fc domain is heterodimeric. In some embodiments, the Fc domain comprises a mutation that reduces or eliminates its effector function. In some embodiments, where there are one signaling agent and two targeting moieties, the targeting moieties are both linked to the signaling agent, wherein one of the targeting moieties is linked to the Fc domain (see FIGS. 20A-L and 23A-L). In some embodiments, the Fc domain is heterodimeric. In some embodiments, the Fc domain comprises a mutation that reduces or eliminates its effector function.

[0697] In some embodiments, where there are one signaling agent and two targeting moieties, the targeting moieties and the signaling agent are linked to the Fc domain (see FIGS. 25A-J and 26A-J). In some embodiments, the targeting moieties are linked on the terminus (see FIGS. 25A-J and 26A-J). In some embodiments, the Fc domain is heterodimeric. In some embodiments, the Fc domain comprises a mutation that reduces or eliminates its effector function.

[0698] In some embodiments, where there are two signaling agents and one targeting moiety, the signaling agents are linked to the Fc domain on the same terminus and the targeting moiety is linked to the Fc domain (see FIGS. 15A-J and 18A-J). In some embodiments, the signaling agents are linked to the Fc domain on the same Fc chain and the targeting moiety is linked on the other Fc chain (see FIGS. 27A-F and 28A-F). In some embodiments, the Fc domain is heterodimeric. In some embodiments, the Fc domain comprises a mutation that reduces or eliminates its effector function.

[0699] In some embodiments, where there are two signaling agents and one targeting moiety, a signaling agent is linked to the targeting moiety, which is linked to the Fc domain and the other signaling agent is linked to the Fc domain (see FIGS. 15A-J, 18A-J, 21A-L, and 24A-L). In some embodiments, the targeting moiety and the unpaired signaling agent are linked to different Fc chains (see FIGS. 15A-J and 18A-J). In some embodiments, the targeting moiety and the unpaired signaling agent are linked to different Fc chains on the same terminus (see FIGS. 15A-J and 18A-J). In some embodiments, the targeting moiety and the unpaired signaling agent are linked to different Fc chains on different termini (see FIGS. 15A-J and 18A-J). In some embodiments, the targeting moiety and the unpaired signaling agent are linked to the same Fc chains (see FIGS. 21A-L and 24A-L). In some embodiments, the Fc domain is heterodimeric. In some embodiments, the Fc domain comprises a mutation that reduces or eliminates its effector function.

[0700] In some embodiments, where there are two signaling agents and one targeting moiety, the targeting moiety is linked to a signaling agent, which is linked to the Fc domain and the other signaling agent is linked to the Fc domain (see FIGS. 15A-J and 18A-J). In some embodiments, the paired signaling agent and the unpaired signaling agent are linked to different Fc chains (see FIGS. 15A-J and 18A-J). In some embodiments, the paired signaling agent and the unpaired signaling agent are linked to different Fc chains on the same terminus (see FIGS. 15A-J and 18A-J). In some embodiments, the paired signaling agent and the unpaired signaling agent are linked to different Fc chains on different termini (see FIGS. 15A-J and 18A-J). In some embodiments, the Fc domain is heterodimeric. In some embodiments, the Fc domain comprises a mutation that reduces or eliminates its effector function.

[0701] In some embodiments, where there are two signaling agents and one targeting moiety, the signaling agents are linked together and the targeting moiety is linked to one of the paired signaling agents, wherein the targeting moiety is linked to the Fc domain (see FIGS. 21A-L and 24A-L). In some embodiments, the Fc domain is heterodimeric. In some embodiments, the Fc domain comprises a mutation that reduces or eliminates its effector function.

[0702] In some embodiments, where there are two signaling agents and one targeting moiety, the signaling agents are linked together and one of the signaling agents is linked to the Fc domain and the targeting moiety is linked to the Fc domain (see FIGS. 21A-L, 24A-L, 27A-F, and 28A-F). In some embodiments, the paired signaling agents and targeting moiety are linked to the same Fc chain (see FIGS. 21A-L and 124A-L). In some embodiments, the paired signaling agents and targeting moiety are linked to different Fc chains (see FIGS. 27A-F and 28A-F). In some embodiments, the paired signaling agents and targeting moiety are linked to different Fc chains on the same terminus (see FIGS. 27A-F and 28A-F). In some embodiments, the Fc domain is heterodimeric. In some embodiments, the Fc domain comprises a mutation that reduces or eliminates its effector function.

[0703] In some embodiments, where there are two signaling agents and one targeting moiety, the signaling agents are both linked to the targeting moiety, wherein one of the signaling agents is linked to the Fc domain (see FIGS. 21A-L and 24A-L). In some embodiments, the Fc domain is heterodimeric. In some embodiments, the Fc domain comprises a mutation that reduces or eliminates its effector function.

[0704] In some embodiments, where there are two signaling agents and one targeting moiety, the signaling agents are linked together and one of the signaling agents is linked to the targeting moiety and the other signaling agent is linked to the Fc domain (see FIGS. 21A-L and 24A-L).

[0705] In some embodiments, where there are two signaling agents and one targeting moiety, each signaling agent is linked to the Fc domain and the targeting moiety is linked to one of the signaling agents (see FIGS. 21A-L and 24A-L). In some embodiments, the signaling agents are linked to the same Fc chain (see FIGS. 21A-L and 24A-L).

[0706] In some embodiments, a targeting moiety or signaling agent is linked to the Fc domain, comprising one or both of CH₂ and CH₃ domains, and optionally a hinge region. For example, vectors encoding the targeting moiety, signaling agent, or combination thereof, linked as a single nucleotide sequence to an Fc domain can be used to prepare such polypeptides.

[0707] In some embodiments, the linker may be utilized to link various functional groups, residues, or moieties as described herein to the Fc-based chimeric protein complex. In some embodiments, the linker is a single amino acid or a plurality of amino acids that does not affect or reduce the stability, orientation, binding, neutralization, and/or clearance characteristics of the binding regions and the binding protein. In various embodiments, the linker is selected from a peptide, a protein, a sugar, or a nucleic acid.

[0708] In some embodiments, the Fc-based chimeric protein complex comprises a linker connecting a targeting moiety and the signaling agent. In some embodiments, the Fc-based chimeric protein complex comprises a linker within the signaling agent (e.g. in the case of single chain TNF, which can comprise two linkers to yield a trimer or in the case of IFN gamma, which can comprise a linkers to yield a dimer).

[0709] The present technology contemplates the use of a variety of linker sequences. In various embodiments, the linker may be derived from naturally-occurring multi-domain proteins or are empirical linkers as described, for example, in Chichili et al., (2013), Protein Sci. 22 (2): 153-167, Chen et al., (2013), Adv Drug Deliv Rev. 65 (10): 1357-1369, the entire contents of which are hereby incorporated by reference. In some embodiments, the linker may be designed using linker designing databases and computer programs such as those described in Chen et al., (2013), Adv Drug Deliv Rev. 65 (10): 1357-1369 and Crasto et al., (2000), Protein Eng. 13 (5): 309-312, the entire contents of which are hereby incorporated by reference. In various embodiments, the linker may be functional. For example, without limitation, the linker may function to improve the folding and/or stability, improve the expression, improve the pharmacokinetics, and/or improve the bioactivity of the Fc-based chimeric protein complex

[0710] In some embodiments, the linker is a polypeptide. In some embodiments, the linker is less than about 100 amino acids long. For example, the linker may be less than about 100, about 95, about 90, about 85, about 80, about 75, about 70, about 65, about 60, about 55, about 50, about 45, about 40, about 35, about 30, about 25, about 20, about 19, about 18, about 17, about 16, about 15, about 14, about 13, about 12, about 11, about 10, about 9, about 8, about 7, about 6, about 5, about 4, about 3, or about 2 amino acids long. In some embodiments, the linker is a polypeptide. In some embodiments, the linker is greater than about 100 amino acids long. For example, the linker may be greater than about 100, about 95, about 90, about 85, about 80, about 75, about 70, about 65, about 60, about 55, about 50, about 45, about 40, about 35, about 30, about 25, about 20, about 19, about 18, about 17, about 16, about 15, about 14, about 13, about 12, about 11, about 10, about 9, about 8, about 7, about 6, about 5, about 4, about 3, or about 2 amino acids long. In some embodiments, the linker is flexible. In another embodiment, the linker is rigid.

[0711] In some embodiments, the linker length allows for efficient binding of a targeting moiety, a signaling agent, and/or an Fc domain to their targets (e.g., receptors). For instance, in some embodiments, the linker length allows for efficient binding of one of the targeting moieties and the signaling agent to receptors on the same cell as well as the efficient binding of the other targeting moiety to another cell. Illustrative pairs of cells are provided elsewhere herein.

[0712] In some embodiments the linker length is at least equal to the minimum distance between the binding sites of a targeting moiety, a signaling agent, and/or an Fc domain targets (e.g., receptors) on the same cell. In some embodiments the linker length is at least twice, or three times, or four times, or five times, or ten times, or twenty times, or 25 times, or 50 times, or one hundred times, or more the minimum distance between the binding sites of a targeting moiety, a signaling agent, and/or an Fc domain targets on the same cell.

[0713] In some embodiments, a linker connects the two targeting moieties to each other and this linker has a short length and a linker connects a targeting moiety and a signaling agent this linker is longer than the linker connecting the two targeting moieties. For example, the difference in amino acid length between the linker connecting the two targeting moieties and the linker connecting a targeting moiety and a signaling agent may be about 100, about 95, about 90, about 85, about 80, about 75, about 70, about 65, about 60, about 55, about 50, about 45, about 40, about 35, about 30, about 25, about 20, about 19, about 18, about 17, about 16, about 15, about 14, about 13, about 12, about 11, about 10, about 9, about 8, about 7, about 6, about 5, about 4, about 3, or about 2 amino acids. In some embodiments, the linker is flexible. In another embodiment, the linker is rigid.

[0714] In various embodiments, the linker is substantially comprised of glycine and serine residues (e.g. about 30%, or about 40%, or about 50%, or about 60%, or about 70%, or about 80%, or about 90%, or about 95%, or about 97% glycines and serines). For example, in some embodiments, the linker is (Gly4Ser)ₙ, where n is from about 1 to about 8, e.g. 1, 2, 3, 4, 5, 6, 7, or 8 (SEQ ID NO: 247-SEQ ID NO: 254). In an embodiment, the linker sequence is GGSGGSGGGGSGGGGS (SEQ ID NO: 255). Additional illustrative linkers include, but are not limited to, linkers having the sequence LE, GGGGS (SEQ ID NO: 247), (GGGGS)ₙ (n=1-4) (SEQ ID NO: 247-SEQ ID NO: 250) (Gly): (SEQ ID NO: 256), (Gly) 6 (SEQ ID NO: 257), (EAAAK)ₙ (n=1-3) (SEQ ID NO: 258-SEQ ID NO: 260), A(EAAAK),A(n=2-5) (SEQ ID NO: 261-SEQ ID NO: 264), AEAAAKEAAAKA(SEQ ID NO: 261), A(EAAAK) 4ALEA(EAAAK) 4A(SEQ ID NO: 265), PAPAP (SEQ ID NO: 266), KESGSVSSEQLAQFRSLD (SEQ ID NO: 267), EGKSSGSGSESKST (SEQ ID NO: 268), GSAGSAAGSGEF (SEQ ID NO: 269), and (XP)ₙ, with X designating any amino acid, e.g., Ala, Lys, or Glu. In various embodiments, the linker is (GGS)ₙ (n=1-20) (SEQ ID NOs: 1162-1181). In some embodiments, the linker is G. In some embodiments, the linker is AAA. In some embodiments, the linker is (GGGGS)ₙ (n=5-20) (SEQ ID NOs: 251-254 and SEQ ID NOs: 1182-1193).

[0715] In some embodiments, the linker is one or more of GGGSE (SEQ ID NO: 270), GSESG (SEQ ID NO: 271), GSEGS (SEQ ID NO: 272), GEGGSGEGSSGEGSSSEGGGSEGGGSEGGGSEGGS (SEQ ID NO: 273), and a linker of randomly placed G, S, and E every 4 amino acid intervals.

[0716] In some embodiments, the linker is a hinge region of an antibody (e.g., of IgG, IgA, IgD, and IgE, inclusive of subclasses (e.g. IgG1, IgG2, IgG3, and IgG4, and IgA1 and IgA2)). In various embodiments, the linker is a hinge region of an antibody (e.g., of IgG, IgA, IgD, and IgE, inclusive of subclasses (e.g. IgG1, IgG2, IgG3, and IgG4, and IgA1 and IgA2)). The hinge region, found in IgG, IgA, IgD, and IgE class antibodies, acts as a flexible spacer, allowing the Fab portion to move freely in space. In contrast to the constant regions, the hinge domains are structurally diverse, varying in both sequence and length among immunoglobulin classes and subclasses. For example, the length and flexibility of the hinge region varies among the IgG subclasses. The hinge region of IgG1 encompasses amino acids 216-231 and, because it is freely flexible, the Fab fragments can rotate about their axes of symmetry and move within a sphere centered at the first of two inter-heavy chain disulfide bridges. IgG2 has a shorter hinge than IgG1, with 12 amino acid residues and four disulfide bridges. The hinge region of IgG2 lacks a glycine residue, is relatively short, and contains a rigid poly-proline double helix, stabilized by extra inter-heavy chain disulfide bridges. These properties restrict the flexibility of the IgG2 molecule. IgG3 differs from the other subclasses by its unique extended hinge region (about four times as long as the IgG1 hinge), containing 62 amino acids (including 21 prolines and 11 cysteines), forming an inflexible poly-proline double helix. In IgG3, the Fab fragments are relatively far away from the Fc fragment, giving the molecule a greater flexibility. The elongated hinge in IgG3 is also responsible for its higher molecular weight compared to the other subclasses. The hinge region of IgG4 is shorter than that of IgG1 and its flexibility is intermediate between that of IgG1 and IgG2. The flexibility of the hinge regions reportedly decreases in the order IgG3>IgG1>IgG4>IgG2.

[0717] According to crystallographic studies, the immunoglobulin hinge region can be further subdivided functionally into three regions: the upper hinge region, the core region, and the lower hinge region. See Shin et al., 1992 Immunological Reviews 130:87. The upper hinge region includes amino acids from the carboxyl end of CHI to the first residue in the hinge that restricts motion, generally the first cysteine residue that forms an interchain disulfide bond between the two heavy chains. The length of the upper hinge region correlates with the segmental flexibility of the antibody. The core hinge region contains the inter-heavy chain disulfide bridges, and the lower hinge region joins the amino terminal end of the C_{H2} domain and includes residues in C_{H2}. Id. The core hinge region of wild-type human IgG1 contains the sequence Cys-Pro-Pro-Cys (SEQ ID NO: 274) which, when dimerized by disulfide bond formation, results in a cyclic octapeptide believed to act as a pivot, thus conferring flexibility. In various embodiments, the present linker comprises, one, or two, or three of the upper hinge region, the core region, and the lower hinge region of any antibody (e.g., of IgG, IgA, IgD, and IgE, inclusive of subclasses (e.g. IgG1, IgG2, IgG3, and IgG4, and IgA1 and IgA2)). The hinge region may also contain one or more glycosylation sites, which include a number of structurally distinct types of sites for carbohydrate attachment. For example, IgA1 contains five glycosylation sites within a 17-amino-acid segment of the hinge region, conferring resistance of the hinge region polypeptide to intestinal proteases, considered an advantageous property for a secretory immunoglobulin. In various embodiments, the linker of the present invention comprises one or more glycosylation sites. In various embodiments, the linker is a hinge-CH₂-CH₃ domain of a human IgG4 antibody.

[0718] If desired, the present chimeric protein can be linked to an antibody Fc region, comprising one or both of CH₂ and CH₃ domains, and optionally a hinge region. For example, vectors encoding the present chimeric proteins or chimeric protein complexes linked as a single nucleotide sequence to an Fc region can be used to prepare such polypeptides.

[0719] In some embodiments, the linker is a synthetic linker such as PEG.

[0720] In various embodiments, the linker may be functional. For example, without limitation, the linker may function to improve the folding and/or stability, improve the expression, improve the pharmacokinetics, and/or improve the bioactivity of the present chimeric protein. In another example, the linker may function to target the chimeric protein or chimeric protein complex to a particular cell type or location.

### Pharmaceutically Acceptable Salts and Excipients

[0721] The chimeric proteins or chimeric protein complexes described herein can possess a sufficiently basic functional group, which can react with an inorganic or organic acid, or a carboxyl group, which can react with an inorganic or organic base, to form a pharmaceutically acceptable salt. A pharmaceutically acceptable acid addition salt is formed from a pharmaceutically acceptable acid, as is well known in the art. Such salts include the pharmaceutically acceptable salts listed in, for example, Journal of Pharmaceutical Science, 66, 2-19 (1977) and The Handbook of Pharmaceutical Salts; Properties, Selection, and Use. P. H. Stahl and C. G. Wermuth (eds.), Verlag, Zurich (Switzerland) 2002, which are hereby incorporated by reference in their entirety.

[0722] Pharmaceutically acceptable salts include, by way of non-limiting example, sulfate, citrate, acetate, oxalate, chloride, bromide, iodide, nitrate, bisulfate, phosphate, acid phosphate, isonicotinate, lactate, salicylate, acid citrate, tartrate, oleate, tannate, pantothenate, bitartrate, ascorbate, succinate, maleate, gentisinate, fumarate, gluconate, glucaronate, saccharate, formate, benzoate, glutamate, methanesulfonate, ethanesulfonate, benzenesulfonate, p-toluenesulfonate, camphorsulfonate, pamoate, phenylacetate, trifluoroacetate, acrylate, chlorobenzoate, dinitrobenzoate, hydroxybenzoate, methoxybenzoate, methylbenzoate, o-acetoxybenzoate, naphthalene-2-benzoate, isobutyrate, phenylbutyrate, a-hydroxybutyrate, butyne-1,4-dicarboxylate, hexyne-1,4-dicarboxylate, caprate, caprylate, cinnamate, glycollate, heptanoate, hippurate, malate, hydroxymaleate, malonate, mandelate, mesylate, nicotinate, phthalate, teraphthalate, propiolate, propionate, phenylpropionate, sebacate, suberate, p-bromobenzenesulfonate, chlorobenzenesulfonate, ethylsulfonate, 2-hydroxyethylsulfonate, methylsulfonate, naphthalene-1-sulfonate, naphthalene-2-sulfonate, naphthalene-1,5-sulfonate, xylenesulfonate, and tartarate salts.

[0723] The term “pharmaceutically acceptable salt” also refers to a salt of the compositions of the present invention having an acidic functional group, such as a carboxylic acid functional group, and a base. Suitable bases include, but are not limited to, hydroxides of alkali metals such as sodium, potassium, and lithium; hydroxides of alkaline earth metal such as calcium and magnesium; hydroxides of other metals, such as aluminum and zinc; ammonia, and organic amines, such as unsubstituted or hydroxy-substituted mono-, di-, or tri-alkylamines, dicyclohexylamine; tributyl amine; pyridine; N-methyl, N-ethylamine; diethylamine; triethylamine; mono-, bis-, or tris-(2-OH-lower alkylamines), such as mono-; bis-, or tris-(2-hydroxyethyl) amine, 2-hydroxy-tert-butylamine, or tris-(hydroxymethyl)methylamine, N,N-di-lower alkyl-N-(hydroxyl-lower alkyl)-amines, such as N,N-dimethyl-N-(2-hydroxyethyl) amine or tri-(2-hydroxyethyl) amine; N-methyl-D-glucamine; and amino acids such as arginine, lysine, and the like.

[0724] In some embodiments, the compositions described herein are in the form of a pharmaceutically acceptable salt.

### Pharmaceutical Compositions and Formulations

[0725] In various embodiments, the present invention pertains to pharmaceutical compositions comprising the chimeric proteins or chimeric protein complexes described herein and a pharmaceutically acceptable carrier or excipient. Any pharmaceutical compositions described herein can be administered to a subject as a component of a composition that comprises a pharmaceutically acceptable carrier or vehicle. Such compositions can optionally comprise a suitable amount of a pharmaceutically acceptable excipient so as to provide the form for proper administration.

[0726] In various embodiments, pharmaceutical excipients can be liquids, such as water and oils, including those of petroleum, animal, vegetable, or synthetic origin, such as peanut oil, soybean oil, mineral oil, sesame oil and the like. The pharmaceutical excipients can be, for example, saline, gum acacia, gelatin, starch paste, talc, keratin, colloidal silica, urea and the like. In addition, auxiliary, stabilizing, thickening, lubricating, and coloring agents can be used. In one embodiment, the pharmaceutically acceptable excipients are sterile when administered to a subject. Water is a useful excipient when any agent described herein is administered intravenously. Saline solutions and aqueous dextrose and glycerol solutions can also be employed as liquid excipients, specifically for injectable solutions. Suitable pharmaceutical excipients also include starch, glucose, lactose, sucrose, gelatin, malt, rice, flour, chalk, silica gel, sodium stearate, glycerol monostearate, talc, sodium chloride, dried skim milk, glycerol, propylene, glycol, water, ethanol and the like. Any agent described herein, if desired, can also comprise minor amounts of wetting or emulsifying agents, or pH buffering agents. Other examples of suitable pharmaceutical excipients are described in Remington's Pharmaceutical Sciences 1447-1676 (Alfonso R. Gennaro eds., 19th ed. 1995), incorporated herein by reference.

[0727] The present invention includes the described pharmaceutical compositions (and/or additional therapeutic agents) in various formulations. Any inventive pharmaceutical composition (and/or additional therapeutic agents) described herein can take the form of solutions, suspensions, emulsion, drops, tablets, pills, pellets, capsules, capsules containing liquids, gelatin capsules, powders, sustained-release formulations, suppositories, emulsions, aerosols, sprays, suspensions, lyophilized powder, frozen suspension, desiccated powder, or any other form suitable for use. In one embodiment, the composition is in the form of a capsule. In another embodiment, the composition is in the form of a tablet. In yet another embodiment, the pharmaceutical composition is formulated in the form of a soft-gel capsule. In a further embodiment, the pharmaceutical composition is formulated in the form of a gelatin capsule. In yet another embodiment, the pharmaceutical composition is formulated as a liquid.

[0728] Where necessary, the inventive pharmaceutical compositions (and/or additional agents) can also include a solubilizing agent. Also, the agents can be delivered with a suitable vehicle or delivery device as known in the art. Combination therapies outlined herein can be co-delivered in a single delivery vehicle or delivery device.

[0729] The formulations comprising the inventive pharmaceutical compositions (and/or additional agents) of the present invention may conveniently be presented in unit dosage forms and may be prepared by any of the methods well known in the art of pharmacy. Such methods generally include the step of bringing the therapeutic agents into association with a carrier, which constitutes one or more accessory ingredients. Typically, the formulations are prepared by uniformly and intimately bringing the therapeutic agent into association with a liquid carrier, a finely divided solid carrier, or both, and then, if necessary, shaping the product into dosage forms of the desired formulation (e.g., wet or dry granulation, powder blends, etc., followed by tableting using conventional methods known in the art).

[0730] In various embodiments, any pharmaceutical compositions (and/or additional agents) described herein is formulated in accordance with routine procedures as a composition adapted for a mode of administration described herein.

[0731] Routes of administration include, for example: oral, intradermal, intramuscular, intraperitoneal, intravenous, subcutaneous, intranasal, epidural, sublingual, intranasal, intracerebral, intravaginal, transdermal, rectally, by inhalation, or topically. Administration can be local or systemic. In some embodiments, the administering is effected orally. In another embodiment, the administration is by parenteral injection. The mode of administration can be left to the discretion of the practitioner, and depends in-part upon the site of the medical condition. In most instances, administration results in the release of any agent described herein into the bloodstream.

[0732] In one embodiment, the chimeric protein or chimeric protein complex described herein is formulated in accordance with routine procedures as a composition adapted for oral administration. Compositions for oral delivery can be in the form of tablets, lozenges, aqueous or oily suspensions, granules, powders, emulsions, capsules, syrups, or elixirs, for example. Orally administered compositions can comprise one or more agents, for example, sweetening agents such as fructose, aspartame or saccharin; flavoring agents such as peppermint, oil of wintergreen, or cherry; coloring agents; and preserving agents, to provide a pharmaceutically palatable preparation. Moreover, where in tablet or pill form, the compositions can be coated to delay disintegration and absorption in the gastrointestinal tract thereby providing a sustained action over an extended period of time. Selectively permeable membranes surrounding an osmotically active driving any chimeric proteins or chimeric protein complexes described herein are also suitable for orally administered compositions. In these latter platforms, fluid from the environment surrounding the capsule is imbibed by the driving compound, which swells to displace the agent or agent composition through an aperture. These delivery platforms can provide an essentially zero order delivery profile as opposed to the spiked profiles of immediate release formulations. A time-delay material such as glycerol monostearate or glycerol stearate can also be useful. Oral compositions can include standard excipients such as mannitol, lactose, starch, magnesium stearate, sodium saccharin, cellulose, and magnesium carbonate. In one embodiment, the excipients are of pharmaceutical grade. Suspensions, in addition to the active compounds, may contain suspending agents such as, for example, ethoxylated isostearyl alcohols, polyoxyethylene sorbitol and sorbitan esters, microcrystalline cellulose, aluminum metahydroxide, bentonite, agar-agar, tragacanth, etc., and mixtures thereof.

[0733] Dosage forms suitable for parenteral administration (e.g. intravenous, intramuscular, intraperitoneal, subcutaneous and intra-articular injection and infusion) include, for example, solutions, suspensions, dispersions, emulsions, and the like. They may also be manufactured in the form of sterile solid compositions (e.g. lyophilized composition), which can be dissolved or suspended in sterile injectable medium immediately before use. They may contain, for example, suspending or dispersing agents known in the art. Formulation components suitable for parenteral administration include a sterile diluent such as water for injection, saline solution, fixed oils, polyethylene glycols, glycerine, propylene glycol or other synthetic solvents; antibacterial agents such as benzyl alcohol or methyl paraben; antioxidants such as ascorbic acid or sodium bisulfite; chelating agents such as EDTA; buffers such as acetates, citrates or phosphates; and agents for the adjustment of tonicity such as sodium chloride or dextrose.

[0734] For intravenous administration, suitable carriers include physiological saline, bacteriostatic water, Cremophor ELTM (BASF, Parsippany, NJ) or phosphate buffered saline (PBS). The carrier should be stable under the conditions of manufacture and storage, and should be preserved against microorganisms. The carrier can be a solvent or dispersion medium containing, for example, water, ethanol, polyol (for example, glycerol, propylene glycol, and liquid polyetheylene glycol), and suitable mixtures thereof.

[0735] The compositions provided herein, alone or in combination with other suitable components, can be made into aerosol formulations (i.e., “nebulized”) to be administered via inhalation. Aerosol formulations can be placed into pressurized acceptable propellants, such as dichlorodifluoromethane, propane, nitrogen, and the like.

[0736] Any inventive pharmaceutical compositions (and/or additional agents) described herein can be administered by controlled-release or sustained-release means or by delivery devices that are well known to those of ordinary skill in the art. Examples include, but are not limited to, those described in U.S. Pat. Nos. 3,845,770; 3,916,899; 3,536,809; 3,598, 123; 4,008,719; 5,674,533; 5,059,595; 5,591,767; 5, 120,548; 5,073,543; 5,639,476; 5,354,556; and 5,733,556, each of which is incorporated herein by reference in its entirety. Such dosage forms can be useful for providing controlled- or sustained-release of one or more active ingredients using, for example, hydropropyl cellulose, hydropropylmethyl cellulose, polyvinylpyrrolidone, other polymer matrices, gels, permeable membranes, osmotic systems, multilayer coatings, microparticles, liposomes, microspheres, or a combination thereof to provide the desired release profile in varying proportions. Suitable controlled- or sustained-release formulations known to those skilled in the art, including those described herein, can be readily selected for use with the active ingredients of the agents described herein. The invention thus provides single unit dosage forms suitable for oral administration such as, but not limited to, tablets, capsules, gelcaps, and caplets that are adapted for controlled- or sustained-release.

[0737] Controlled- or sustained-release of an active ingredient can be stimulated by various conditions, including but not limited to, changes in pH, changes in temperature, stimulation by an appropriate wavelength of light, concentration or availability of enzymes, concentration or availability of water, or other physiological conditions or compounds.

[0738] In another embodiment, a controlled-release system can be placed in proximity of the target area to be treated, thus requiring only a fraction of the systemic dose (see, e.g., Goodson, in Medical Applications of Controlled Release, supra, vol. 2, pp. 115-138 (1984)). Other controlled-release systems discussed in the review by Langer, 1990, Science 249:1527-1533) may be used.

[0739] Pharmaceutical formulations preferably are sterile. Sterilization can be accomplished, for example, by filtration through sterile filtration membranes. Where the composition is lyophilized, filter sterilization can be conducted prior to or following lyophilization and reconstitution.

### Administration and Dosage

[0740] It will be appreciated that the actual dose of the chimeric protein or chimeric protein complex to be administered according to the present invention will vary according to the particular dosage form, and the mode of administration. Many factors that may modify the action of the chimeric protein or chimeric protein complex (e.g., body weight, gender, diet, time of administration, route of administration, rate of excretion, condition of the subject, drug combinations, genetic disposition and reaction sensitivities) can be taken into account by those skilled in the art. Administration can be carried out continuously or in one or more discrete doses within the maximum tolerated dose. Optimal administration rates for a given set of conditions can be ascertained by those skilled in the art using conventional dosage administration tests.

[0741] In some embodiments, a suitable dosage of the chimeric protein or chimeric protein complex is in a range of about 0.01 mg/kg to about 10 g/kg of body weight of the subject, about 0.01 mg/kg to about 1 g/kg of body weight of the subject, about 0.01 mg/kg to about 100 mg/kg of body weight of the subject, about 0.01 mg/kg to about 10 mg/kg of body weight of the subject, for example, about 0.01 mg/kg, about 0.02 mg/kg, about 0.03 mg/kg, about 0.04 mg/kg, about 0.05 mg/kg, about 0.06 mg/kg, about 0.07 mg/kg, about 0.08 mg/kg, about 0.09 mg/kg, about 0.1 mg/kg, about 0.2 mg/kg, about 0.3 mg/kg, about 0.4 mg/kg, about 0.5 mg/kg, about 0.6 mg/kg, about 0.7 mg/kg, about 0.8 mg/kg, about 0.9 mg/kg, about 1 mg/kg, about 1.1 mg/kg, about 1.2 mg/kg, about 1.3 mg/kg, about 1.4 mg/kg, about 1.5 mg/kg, about 1.6 mg/kg, about 1.7 mg/kg, about 1.8 mg/kg, 1.9 mg/kg, about 2 mg/kg, about 3 mg/kg, about 4 mg/kg, about 5 mg/kg, about 6 mg/kg, about 7 mg/kg, about 8 mg/kg, about 9 mg/kg, about 10 mg/kg body weight, about 100 mg/kg body weight, about 1 g/kg of body weight, about 10 g/kg of body weight, inclusive of all values and ranges therebetween.

[0742] Individual doses of the chimeric protein or chimeric protein complex can be administered in unit dosage forms (e.g., tablets or capsules) containing, for example, from about 0.01 mg to about 100 g, from about 0.01 mg to about 75 g, from about 0.01 mg to about 50 g, from about 0.01 mg to about 25 g, about 0.01 mg to about 10 g, about 0.01 mg to about 7.5 g, about 0.01 mg to about 5 g, about 0.01 mg to about 2.5 g, about 0.01 mg to about 1 g, about 0.01 mg to about 100 mg, from about 0.1 mg to about 100 mg, from about 0.1 mg to about 90 mg, from about 0.1 mg to about 80 mg, from about 0.1 mg to about 70 mg, from about 0.1 mg to about 60 mg, from about 0.1 mg to about 50 mg, from about 0.1 mg to about 40 mg active ingredient, from about 0.1 mg to about 30 mg, from about 0.1 mg to about 20 mg, from about 0.1 mg to about 10 mg, from about 0.1 mg to about 5 mg, from about 0.1 mg to about 3 mg, from about 0.1 mg to about 1 mg per unit dosage form, or from about 5 mg to about 80 mg per unit dosage form. For example, a unit dosage form can be about 0.01 mg, about 0.02 mg, about 0.03 mg, about 0.04 mg, about 0.05 mg, about 0.06 mg, about 0.07 mg, about 0.08 mg, about 0.09 mg, about 0.1 mg, about 0.2 mg, about 0.3 mg, about 0.4 mg, about 0.5 mg, about 0.6 mg, about 0.7 mg, about 0.8 mg, about 0.9 mg, about 1 mg, about 2 mg, about 3 mg, about 4 mg, about 5 mg, about 6 mg, about 7 mg, about 8 mg, about 9 mg about 10 mg, about 15 mg, about 20 mg, about 25 mg, about 30 mg, about 35 mg, about 40 mg, about 45 mg, about 50 mg, about 55 mg, about 60 mg, about 65 mg, about 70 mg, about 75 mg, about 80 mg, about 85 mg, about 90 mg, about 95 mg, about 100 mg, about 200 mg, about 500 mg, about 1 g, about 2.5 g, about 5 g, about 10 g, about 25 g, about 50 g, about 75 g, about 100 g, inclusive of all values and ranges therebetween.

[0743] In one embodiment, the chimeric protein or chimeric protein complex is administered at an amount of from about 0.01 mg to about 100 g daily, from about 0.01 mg to about 75 g daily, from about 0.01 mg to about 50 g daily, from about 0.01 mg to about 25 g daily, from about 0.01 mg to about 10 g daily, from about 0.01 mg to about 7.5 g daily, from about 0.01 mg to about 5 g daily, from about 0.01 mg to about 2.5 g daily, from about 0.01 mg to about 1 g daily, from about 0.01 mg to about 100 mg daily, from about 0.1 mg to about 100 mg daily, from about 0.1 mg to about 95 mg daily, from about 0.1 mg to about 90 mg daily, from about 0.1 mg to about 85 mg daily, from about 0.1 mg to about 80 mg daily, from about 0.1 mg to about 75 mg daily, from about 0.1 mg to about 70 mg daily, from about 0.1 mg to about 65 mg daily, from about 0.1 mg to about 60 mg daily, from about 0.1 mg to about 55 mg daily, from about 0.1 mg to about 50 mg daily, from about 0.1 mg to about 45 mg daily, from about 0.1 mg to about 40 mg daily, from about 0.1 mg to about 35 mg daily, from about 0.1 mg to about 30 mg daily, from about 0.1 mg to about 25 mg daily, from about 0.1 mg to about 20 mg daily, from about 0.1 mg to about 15 mg daily, from about 0.1 mg to about 10 mg daily, from about 0.1 mg to about 5 mg daily, from about 0.1 mg to about 3 mg daily, from about 0.1 mg to about 1 mg daily, or from about 5 mg to about 80 mg daily. In various embodiments, the chimeric protein or chimeric protein complex is administered at a daily dose of about 0.01 mg, about 0.02 mg, about 0.03 mg, about 0.04 mg, about 0.05 mg, about 0.06 mg, about 0.07 mg, about 0.08 mg, about 0.09 mg, about 0.1 mg, about 0.2 mg, about 0.3 mg, about 0.4 mg, about 0.5 mg, about 0.6 mg, about 0.7 mg, about 0.8 mg, about 0.9 mg, about 1 mg, about 2 mg, about 3 mg, about 4 mg, about 5 mg, about 6 mg, about 7 mg, about 8 mg, about 9 mg about 10 mg, about 15 mg, about 20 mg, about 25 mg, about 30 mg, about 35 mg, about 40 mg, about 45 mg, about 50 mg, about 55 mg, about 60 mg, about 65 mg, about 70 mg, about 75 mg, about 80 mg, about 85 mg, about 90 mg, about 95 mg, about 100 mg, about 200 mg, about 500 mg, about 1 g, about 2.5 g, about 5 g, about 7.5 g, about 10 g, about 25 g, about 50 g, about 75 g, about 100 g, inclusive of all values and ranges therebetween.

[0744] In accordance with certain embodiments of the invention, the pharmaceutical composition comprising the chimeric protein or chimeric protein complex may be administered, for example, more than once daily (e.g., about two times, about three times, about four times, about five times, about six times, about seven times, about eight times, about nine times, or about ten times daily), about once per day, about every other day, about every third day, about once a week, about once every two weeks, about once every month, about once every two months, about once every three months, about once every six months, or about once every year.

### Combination Therapy and Additional Therapeutic Agents

[0745] In various embodiments, the pharmaceutical composition of the present invention is co-administered in conjunction with additional therapeutic agent(s). Co-administration can be simultaneous or sequential.

[0746] In one embodiment, the additional therapeutic agent and the chimeric protein or chimeric protein complex of the present invention are administered to a subject simultaneously. The term “simultaneously” as used herein, means that the additional therapeutic agent and the chimeric protein or chimeric protein complex are administered with a time separation of no more than about 60 minutes, such as no more than about 30 minutes, no more than about 20 minutes, no more than about 10 minutes, no more than about 5 minutes, or no more than about 1 minute. Administration of the additional therapeutic agent and the chimeric protein or chimeric protein complex can be by simultaneous administration of a single formulation (e.g., a formulation comprising the additional therapeutic agent and the chimeric protein) or of separate formulations (e.g., a first formulation including the additional therapeutic agent and a second formulation including the chimeric protein).

[0747] Co-administration does not require the therapeutic agents to be administered simultaneously, if the timing of their administration is such that the pharmacological activities of the additional therapeutic agent and the chimeric protein or chimeric protein complex overlap in time, thereby exerting a combined therapeutic effect. For example, the additional therapeutic agent and the chimeric protein or chimeric protein complex can be administered sequentially. The term “sequentially” as used herein means that the additional therapeutic agent and the chimeric protein or chimeric protein complex are administered with a time separation of more than about 60 minutes. For example, the time between the sequential administration of the additional therapeutic agent and the chimeric protein or chimeric protein complex can be more than about 60 minutes, more than about 2 hours, more than about 5 hours, more than about 10 hours, more than about 1 day, more than about 2 days, more than about 3 days, more than about 1 week apart, more than about 2 weeks apart, or more than about one month apart. The optimal administration times will depend on the rates of metabolism, excretion, and/or the pharmacodynamic activity of the additional therapeutic agent and the chimeric protein or chimeric protein complex being administered. Either the additional therapeutic agent or the chimeric protein or chimeric protein complex cell may be administered first.

[0748] Co-administration also does not require the therapeutic agents to be administered to the subject by the same route of administration. Rather, each therapeutic agent can be administered by any appropriate route, for example, parenterally or non-parenterally.

[0749] In some embodiments, the Clec4C binding agent described herein acts synergistically when co-administered with another therapeutic agent. In such embodiments, the Clec4C binding agent and the additional therapeutic agent may be administered at doses that are lower than the doses employed when the agents are used in the context of monotherapy.

[0750] In some embodiments, the present invention pertains to chemotherapeutic agents as additional therapeutic agents. For example, without limitation, such combination of the present Clec4C binding agents and chemotherapeutic agent find use in the treatment of cancers, as described elsewhere herein. Examples of chemotherapeutic agents include, but are not limited to, alkylating agents such as thiotepa and CYTOXAN cyclosphosphamide; alkyl sulfonates such as busulfan, improsulfan and piposulfan; aziridines such as benzodopa, carboquone, meturedopa, and uredopa; ethylenimines and methylamelamines including altretamine, triethylenemelamine, trietylenephosphoramide, triethiylenethiophosphoramide and trimethylolomelamine; acetogenins (e.g., bullatacin and bullatacinone); a camptothecin (including the synthetic analogue topotecan); bryostatin; cally statin; CC-1065 (including its adozelesin, carzelesin and bizelesin synthetic analogues); cryptophycins (e.g., cryptophycin 1 and cryptophycin 8); dolastatin; duocarmycin (including the synthetic analogues, KW-2189 and CB 1-TM1); eleutherobin; pancratistatin; a sarcodictyin; spongistatin; nitrogen mustards such as chlorambucil, chlornaphazine, cholophosphamide, estramustine, ifosfamide, mechlorethamine, mechlorethamine oxide hydrochloride, melphalan, novembichin, phenesterine, prednimustine, trofosfamide, uracil mustard; nitrosureas such as carmustine, chlorozotocin, fotemustine, lomustine, nimustine, and ranimnustine; antibiotics such as the enediyne antibiotics (e.g., calicheamicin, especially calicheamicin gammall and calicheamicin omegall (see, e.g., Agnew, Chem. Intl. Ed. Engl., 33:183-186 (1994)); dynemicin, including dynemicin A; bisphosphonates, such as clodronate; an esperamicin; as well as neocarzinostatin chromophore and related chromoprotein enediyne antibiotic chromophores), aclacinomysins, actinomycin, authramycin, azaserine, bleomycins, cactinomycin, carabicin, caminomycin, carzinophilin, chromomycinis, dactinomycin, daunorubicin, detorubicin, 6-diazo-5-oxo-L-norleucine, ADRIAMYCIN doxorubicin (including morpholino-doxorubicin, cyanomorpholino-doxorubicin, 2-pyrrolino-doxorubicin and deoxy doxorubicin), epirubicin, esorubicin, idarubicin, marcellomycin, mitomycins such as mitomycin C, mycophenolic acid, nogalamycin, olivomycins, peplomycin, potfiromycin, puromycin, quelamycin, rodorubicin, streptonigrin, streptozocin, tubercidin, ubenimex, zinostatin, zorubicin; anti-metabolites such as methotrexate and 5-fluorouracil (5-FU); folic acid analogues such as denopterin, methotrexate, pteropterin, trimetrexate; purine analogs such as fludarabine, 6-mercaptopurine, thiamiprine, thioguanine; pyrimidine analogs such as ancitabine, azacitidine, 6-azauridine, carmofur, cytarabine, dideoxyuridine, doxifluridine, enocitabine, floxuridine; androgens such as calusterone, dromostanolone propionate, epitiostanol, mepitiostane, testolactone; anti-adrenals such as minoglutethimide, mitotane, trilostane; folic acid replenisher such as frolinic acid; aceglatone; aldophosphamide glycoside; aminolevulinic acid; eniluracil; amsacrine; bestrabucil; bisantrene; edatraxate; demecolcine; diaziquone; elformithine; elliptinium acetate; an epothilone; etoglucid; gallium nitrate; hydroxyurea; lentinan; lonidainine; maytansinoids such as maytansine and ansamitocins; mitoguazone; mitoxantrone; mopidanmol; nitraerine; pentostatin; phenamet; pirarubicin; losoxantrone; podophyllinic acid; 2-ethylhydrazide; procarbazine; PSK polysaccharide complex (JHS Natural Products, Eugene, Oreg.); razoxane; rhizoxin; sizofuran; spirogermanium; tenuazonic acid; triaziquone; 2,2′,2″-trichlorotriethylamine; trichothecenes (e.g., T-2 toxin, verracurin A, roridin A and anguidine); urethan; vindesine; dacarbazine; mannomustine; mitobronitol; mitolactol; pipobroman; gacytosine; arabinoside (“Ara-C”); cyclophosphamide; thiotepa; taxoids, e.g., TAXOL paclitaxel (Bristol-Myers Squibb Oncology, Princeton, N.J.), ABRAXANE Cremophor-free, albumin-engineered nanoparticle formulation of paclitaxel (American Pharmaceutical Partners, Schaumberg, 111), and TAXOTERE doxetaxel (Rhone-Poulenc Rorer, Antony, France); chloranbucil; GEMZAR gemcitabine; 6-thioguanine; mercaptopurine; methotrexate; platinum analogs such as cisplatin, oxaliplatin and carboplatin; vinblastine; platinum; etoposide (VP-16); ifosfamide; mitoxantrone; vincristine; NAVELBINE. vinorelbine; novantrone; teniposide; edatrexate; daunomycin; aminopterin; xeloda; ibandronate; irinotecan (Camptosar, CPT-11) (including the treatment regimen of irinotecan with 5-FU and leucovorin); topoisomerase inhibitor RFS 2000; difluoromethylornithine (DMFO); retinoids such as retinoic acid; capecitabine; combretastatin; leucovorin (LV); oxaliplatin, including the oxaliplatin treatment regimen (FOLFOX); lapatinib (Tykerb); inhibitors of PKC-a, Raf, H-Ras, EGFR (e.g., erlotinib (Tarceva)) and VEGF-A that reduce cell proliferation and pharmaceutically acceptable salts, acids or derivatives of any of the above. In addition, the methods of treatment can further include the use of radiation. In addition, the methods of treatment can further include the use of photodynamic therapy.

[0751] Accordingly, in some embodiments, the present invention relates to combination therapies using the Clec4C binding agent and a chemotherapeutic agent. In some embodiments, the present invention relates to administration of the Clec4C binding agent to a patient undergoing treatment with a chemotherapeutic agent. In some embodiments, the chemotherapeutic agent is a DNA-intercalating agent such as, without limitation, doxorubicin, cisplatin, daunorubicin, and epirubicin. In an embodiment, the DNA-intercalating agent is doxorubicin.

[0752] In illustrative embodiments, the Clec4C binding agent acts synergistically when co-administered with doxorubicin. In an illustrative embodiment, the Clec4C binding agent acts synergistically when co-administered with doxorubicin for use in treating tumor or cancer. For example, co-administration of the Clec4C binding agent and doxorubicin may act synergistically to reduce or eliminate the tumor or cancer, or slow the growth and/or progression and/or metastasis of the tumor or cancer. In illustrative embodiments, the combination of the Clec4C binding agent and doxorubicin may exhibit improved safety profiles when compared to the agents used alone in the context of monotherapy. In illustrative embodiments, the Clec4C binding agent and doxorubicin may be administered at doses that are lower than the doses employed when the agents are used in the context of monotherapy. In some embodiments, the Clec4C binding agent comprises a mutated interferon such as a mutated IFNα. In illustrative embodiments, the mutated IFN-α2 comprises one or more mutations at positions 148, 149, and 153 with reference to SEQ ID NO: 46 or SEQ ID NO: 47, such as the substitutions M148A, R149A, and L153A.

[0753] In some embodiments, the present invention relates to combination therapy with one or more immune-modulating agents, for example, without limitation, agents that modulate immune checkpoint. In various embodiments, the immune-modulating agent targets one or more of PD-1, PD-L1, and PD-L2. In various embodiments, the immune-modulating agent is PD-1 inhibitor. In various embodiments, the immune-modulating agent is an antibody specific for one or more of PD-1, PD-L1, and PD-L2. For instance, in some embodiments, the immune-modulating agent is an antibody such as, by way of non-limitation, nivolumab, (ONO-4538/BMS-936558, MDX1106, OPDIVO, BRISTOL MYERS SQUIBB), pembrolizumab (KEYTRUDA, MERCK), pidilizumab (CT-011, CURE TECH), MK-3475 (MERCK), BMS 936559 (BRISTOL MYERS SQUIBB), MPDL3280A(ROCHE). In some embodiments, the immune-modulating agent targets one or more of CD137 or CD137L. In various embodiments, the immune-modulating agent is an antibody specific for one or more of CD137 or CD137L. For instance, in some embodiments, the immune-modulating agent is an antibody such as, by way of non-limitation, urelumab (also known as BMS-663513 and anti-4-1BB antibody). In some embodiments, the present chimeric protein or chimeric protein complex is combined with urelumab (optionally with one or more of nivolumab, lirilumab, and urelumab) for the treatment of solid tumors and/or B-cell non-Hodgkins lymphoma and/or head and neck cancer and/or multiple myeloma. In some embodiments, the immune-modulating agent is an agent that targets one or more of CTLA-4, AP2M1, CD80, CD86, SHP-2, and PPP2R5A. In various embodiments, the immune-modulating agent is an antibody specific for one or more of CTLA-4, AP2M1, CD80, CD86, SHP-2, and PPP2R5A. For instance, in some embodiments, the immune-modulating agent is an antibody such as, by way of non-limitation, ipilimumab (MDX-010, MDX-101, Yervoy, BMS) and/or tremelimumab (Pfizer). In some embodiments, the present chimeric protein or chimeric protein complex is combined with ipilimumab (optionally with bavituximab) for the treatment of one or more of melanoma, prostate cancer, and lung cancer. In various embodiments, the immune-modulating agent targets CD20. In various embodiments, the immune-modulating agent is an antibody specific CD20. For instance, in some embodiments, the immune-modulating agent is an antibody such as, by way of non-limitation, Ofatumumab (GENMAB), obinutuzumab (GAZYVA), AME-133v (APPLIED MOLECULAR EVOLUTION), Ocrelizumab (GENENTECH), TRU-015 (TRUBION/EMERGENT), veltuzumab (IMMU-106).

[0754] In some embodiments, the present invention relates to combination therapy using the Clec4C binding agent and a checkpoint inhibitor. In some embodiments, the present invention relates to administration of the Clec4C binding agent to a patient undergoing treatment with a checkpoint inhibitor. In some embodiments, the checkpoint inhibitor is an agent that targets one or more of PD-1, PD-L1, PD-L2, and CTLA-4 (including any of the anti-PD-1, anti-PD-L1, anti-PD-L2, and anti-CTLA-4 agents described herein). In some embodiment, the checkpoint inhibitor is one or more of nivolumab, (ONO-4538/BMS-936558, MDX1106, OPDIVO, BRISTOL MYERS SQUIBB), pembrolizumab (KEYTRUDA, MERCK), pidilizumab (CT-011, CURE TECH), MK-3475 (MERCK), BMS 936559 (BRISTOL MYERS SQUIBB), MPDL3280A(ROCHE), ipilimumab (MDX-010, MDX-101, Yervoy, BMS) and tremelimumab (Pfizer). In an embodiment, the checkpoint inhibitor is an antibody against PD-L1.

[0755] In illustrative embodiments, the Clec4C binding agent acts synergistically when co-administered with the anti-PD-L1 antibody. In an illustrative embodiment, the Clec4C binding agent acts synergistically when co-administered with the anti-PD-L1 antibody for use in treating tumor or cancer. For example, co-administration of the Clec4C binding agent and the anti-PD-L1 antibody may act synergistically to reduce or eliminate the tumor or cancer, or slow the growth and/or progression and/or metastasis of the tumor or cancer. In some embodiments, the combination of the Clec4C binding agent and the anti-PD-L1 antibody may exhibit improved safety profiles when compared to the agents used alone in the context of monotherapy. In some embodiments, the Clec4C binding agent and the anti-PD-L1 antibody may be administered at doses that are lower than the doses employed when the agents are used in the context of monotherapy. In some embodiments, the Clec4C binding agent comprises a mutated interferon such as a mutated IFNα. In illustrative embodiments, the mutated IFNα comprises one or more mutations at positions 148, 149, and 153 with reference to SEQ ID NO: 337 or SEQ ID NO: 338, such as the substitutions M148A, R149A, and L153A.

[0756] In some embodiments, the present invention relates to combination therapies using the Clec4C binding agent and an immunosuppressive agent. In some embodiments, the present invention relates to administration of the Clec4C binding agent to a patient undergoing treatment with an immunosuppressive agent. In an embodiment, the immunosuppressive agent is TNF.

[0757] In illustrative embodiments, the Clec4C binding agent acts synergistically when co-administered with TNF. In an illustrative embodiment, the Clec4C binding agent acts synergistically when co-administered with TNF for use in treating tumor or cancer. For example, co-administration of the Clec4C binding agent and TNF may act synergistically to reduce or eliminate the tumor or cancer, or slow the growth and/or progression and/or metastasis of the tumor or cancer. In some embodiments, the combination of the Clec4C binding agent and TNF may exhibit improved safety profiles when compared to the agents used alone in the context of monotherapy. In some embodiments, the Clec4C binding agent and TNF may be administered at doses that are lower than the doses employed when the agents are used in the context of monotherapy. In some embodiments, the Clec4C binding agent comprises a mutated interferon such as a mutated IFNα. In illustrative embodiments, the mutated IFNα comprises one or more mutations at positions 148, 149, and 153 with reference to SEQ ID NO: 337 or SEQ ID NO: 338, such as the substitutions M148A, R149A, and L153A.

[0758] In some embodiments, the Clec4C binding agent acts synergistically when used in combination with Chimeric Antigen Receptor (CAR) T-cell therapy. In an illustrative embodiment, the Clec4C binding agent acts synergistically when used in combination with CAR T-cell therapy in treating tumor or cancer. In an embodiment, the Clec4C binding agent acts synergistically when used in combination with CAR T-cell therapy in treating blood-based tumors. In an embodiment, the Clec4C binding agent acts synergistically when used in combination with CAR T-cell therapy in treating solid tumors. For example, use of the Clec4C binding agent and CAR T-cells may act synergistically to reduce or eliminate the tumor or cancer, or slow the growth and/or progression and/or metastasis of the tumor or cancer. In various embodiments, the Clec4C binding agent of the invention induces CAR T-cell division. In various embodiments, the Clec4C binding agent of the invention induces CAR T-cell proliferation. In various embodiments, the Clec4C binding agent of the invention prevents anergy of the CAR T cells.

[0759] In various embodiments, the CAR T-cell therapy comprises CAR T cells that target antigens (e.g., tumor antigens) such as, but not limited to, carbonic anhydrase IX (CAIX), 5T4, CD19, CD20, CD22, CD27, CD30, CD33, CD38, CD47, CD70, CS1, CD138, Lewis-Y, L1-CAM, MUC16, ROR-1, IL13Ra2, gp100, prostate stem cell antigen (PSCA), prostate-specific membrane antigen (PSMA), B-cell maturation antigen (BCMA), human papillomavirus type 16 E6 (HPV-16 E6), CD171, folate receptor alpha (FR-a), GD2, human epidermal growth factor receptor 2 (HER2), mesothelin, EGFRvlll, fibroblast activation protein (FAP), carcinoembryonic antigen (CEA), and vascular endothelial growth factor receptor 2 (VEGF-R2), as well as other tumor antigens well known in the art. Additional illustrative tumor antigens include, but are not limited to MART-1/Melan-A, gp 100, Dipeptidyl peptidase IV (DPPIV), adenosine deaminase-binding protein (ADAbp), cyclophilin b, Colorectal associated antigen (CRC)-0017-1A/GA733, Carcinoembryonic Antigen (CEA) and its immunogenic epitopes CAP-1 and CAP-2, etv6, aml1, Prostate Specific Antigen (PSA) and its immunogenic epitopes PSA-1, PSA-2, and PSA-3, T-cell receptor/CD3-zeta chain, MAGE-family of tumor antigens (e.g., MAGE-A1, MAGE-A2, MAGE-A3, MAGE-A4, MAGE-A5, MAGE-A6, MAGE-A7, MAGE-A8, MAGE-A9, MAGE-A10, MAGE-A11, MAGE-A12, MAGE-Xp2 (MAGE-B2), MAGE-Xp3 (MAGE-B3), MAGE-Xp4 (MAGE-B4), MAGE-C1, MAGE-C2, MAGE-C3, MAGE-C4, MAGE-C5), GAGE-family of tumor antigens (e.g., GAGE-1, GAGE-2, GAGE-3, GAGE-4, GAGE-5, GAGE-6, GAGE-7, GAGE-8, GAGE-9), BAGE, RAGE, LAGE-1, NAG, GnT-V, MUM-1, CDK4, tyrosinase, p53, MUC family, HER2/neu, p21ras, RCAS1, a-fetoprotein, E-cadherin, a-catenin, B-catenin and y-catenin, p120ctn, gp100 Pmel117, PRAME, NY-ESO-1, cdc27, adenomatous polyposis coli protein (APC), fodrin, Connexin 37, Ig-idiotype, p15, gp75, GM2 and GD2 gangliosides, viral products such as human papilloma virus proteins, Smad family of tumor antigens, Imp-1, NA, EBV-encoded nuclear antigen (EBNA)-1, brain glycogen phosphorylase, SSX-1, SSX-2 (HOM-MEL-40), SSX-1, SSX-4, SSX-5, SCP-1 CT-7, c-erbB-2, CD19, CD37, CD56, CD70, CD74, CD138, AGS16, MUC1, GPNMB, Ep-CAM, PD-L1, and PD-L2.

[0760] Illustrative CAR T-cell therapy include, but are not limited to, JCAR014 (Juno Therapeutics), JCAR015 (Juno Therapeutics), JCAR017 (Juno Therapeutics), JCAR018 (Juno Therapeutics), JCAR020 (Juno Therapeutics), JCAR023 (Juno Therapeutics), JCAR024 (Juno Therapeutics), CTL019 (Novartis), KTE-C19 (Kite Pharma), BPX-401 (Bellicum Pharmaceuticals), BPX-501 (Bellicum Pharmaceuticals), BPX-601 (Bellicum Pharmaceuticals), bb2121 (Bluebird Bio), CD-19 Sleeping Beauty cells (Ziopharm Oncology), UCART19 (Cellectis), UCART123 (Cellectis), UCART38 (Cellectis), UCARTCS1 (Cellectis), OXB-302 (Oxford BioMedica, MB-101 (Mustang Bio) and CAR T-cells developed by Innovative Cellular Therapeutics.

[0761] In some embodiments, the Clec4C binding agent is used in a method of treating multiple sclerosis (MS) in combination with one or more MS therapeutics including, but not limited to, 3-interferons, L acetate, T-interferon, IFN-β-2 (U.S. Patent Publication No. 2002/0025304), spirogermaniums (e.g., N-(3-dimethylaminopropyl)-2-aza-8,8-dimethyl-8-germanspiro[4:5]decane, N-(3-dimethylaminopropyl)-2-aza-8,8-diethyl-8-germaspiro[4:5] decane, N-(3-dimethylaminopropyl)-2-aza-8,8-dipropyl-8-germaspiro[4:5]decane, and N-(3-dimethylaminopropyl)-2-aza-8, 8-dibutyl-8-germaspiro[4:5]decane), vitamin D analogs (e.g., 1,25 (OH) 2D3, (see, e.g., U.S. Pat. No. 5,716,946)), prostaglandins (e.g., latanoprost, brimonidine, PGE1, PGE2 and PGE3, see, e.g., U.S. Patent Publication No. 2002/0004525), tetracycline and derivatives (e.g., minocycline and doxycycline, see, e.g., U.S. Patent Publication No. 20020022608), a VLA-4 binding antibody (see, e.g., U.S. Patent Publication No. 2009/0202527), adrenocorticotrophic hormone, corticosteroid, prednisone, methylprednisone, 2-chlorodeoxyadenosine, mitoxantrone, sulphasalazine, methotrexate, azathioprine, cyclophosphamide, cyclosporin, fumarate, anti-CD20 antibody (e.g., rituximab), and tizanidine hydrochloride.

[0762] In some embodiments, the Clec4C binding agent is used in combination with one or more therapeutic agents that treat one or more symptoms or side effects of MS. Such agents include, but are not limited to, amantadine, baclofen, papaverine, meclizine, hydroxyzine, sulfamethoxazole, ciprofloxacin, docusate, pemoline, dantrolene, desmopressin, dexamethasone, tolterodine, phenyloin, oxybutynin, bisacodyl, venlafaxine, amitriptyline, methenamine, clonazepam, isoniazid, vardenafil, nitrofurantoin, psyllium hydrophilic mucilloid, alprostadil, gabapentin, nortriptyline, paroxetine, propantheline bromide, modafinil, fluoxetine, phenazopyridine, methylprednisolone, carbamazepine, imipramine, diazepam, sildenafil, bupropion, and sertraline.

[0763] In some embodiments, the Clec4C binding agent is used in a method of treating multiple sclerosis in combination with one or more of the disease modifying therapies (DMTs) described herein (e.g. the agents of Table 6). In some embodiments, the present invention provides an improved therapeutic effect as compared to use of one or more of the DMTs described herein (e.g. the agents listed in the Table 6 below) without the one or more disclosed binding agent. In an embodiment, the combination of the Clec4C binding agent and the one or more DMTs produces synergistic therapeutic effects.

TABLE 6
Illustrative Disease Modifying Therapies

| Generic Name | Branded Name/Company | Frequency/Route of Delivery/Usual Dose |
|---|---|---|
| teriflunomide | AUBAGIO (GENZYME) | Every day; pill taken orally; 7 mg or 14 mg. |
| interferon beta-1a | AVONEX (BIOGEN IDEC) | Once a week; intramuscular (into the muscle) |
| | | injection; 30 mcg |
| interferon beta-1b | BETASERON (BAYER | Every other day; subcutaneous (under the skin) |
| | HEALTHCARE | injection; 250 mcg. |
| | PHARMACEUTICALS, INC.) | |
| glatiramer acetate | COPAXONE (TEVA | Every day; subcutaneous (under the skin) |
| | NEUROSCIENCE) | injection; 20 mg (20,000 mcg) OR Three times a |
| | | week; subcutaneous (under the skin) injection; 40 |
| | | mg (40,000 mcg) |
| interferon beta-1b | EXTAVIA (NOVARTIS | Every other day; subcutaneous (under the skin) |
| | PHARMACEUTICALS CORP.) | injection; 250 mcg. |
| fingolimod | GILENYA (NOVARTIS | Every day; capsule taken orally; 0.5 mg. |
| | PHARMACEUTICALS CORP.) | |
| Alemtuzumab (anti-CD52 | LEMTRADA (GENZYME) | Intravenous infusion on five consecutive days, |
| monoclonal antibody) | | followed by intravenous infusion on three |
| | | consecutive days one year later (12 mg) |
| mitoxantrone | NOVANTRONE (EMD | Four times a year by IV infusion in a medical |
| | SERONO) | facility. Lifetime cumulative dose limit of |
| | | approximately 8-12 doses over 2-3 years (140 |
| | | mg/m2). |
| pegylated interferon beta-1a | PLEGRIDY (BIOGEN IDEC) | Every 14 days; subcutaneous (under the skin) |
| | | injection; 125 mcg |
| interferon beta-1a | REBIF (EMD SERONO, INC.) | Three times a week; subcutaneous (under the |
| | | skin) injection; 44 mcg |
| dimethyl fumarate (BG-12) | TECFIDERA (BIOGEN IDEC) | Twice a day; capsule taken orally; 120 mg for one |
| | | week and 240 mg therafter |
| Natalizumab (humanized | TYSABRI (BIOGEN IDEC) | Every four weeks by IV infusion in a registered |
| monoclonal antibody VLA-4 | | infusion facility; 300 mg |
| antagonist) | | |

DMTs in Development

| | | |
|---|---|---|
| Amiloride (targets Acid- | PAR PHARMACEUTICAL, | Oral |
| sensing ion channel-1 | PERRIGO COMPANY, | |
| Epithelial sodium channel | SIGMAPHARM | |
| Na+/H+ exchanger) | LABORATORIES | |
| ATX-MS-1467 (targets Major | APITOPE/MERCK SERONO | Intradermal Subcutaneous |
| histocompatibility complex | | |
| class II T cell responses to | | |
| myelin basic protein) | | |
| BAF312 (targets | NOVARTIS PHARMA | Oral |
| Sphingosine 1-phosphate | | |
| (S1P) receptor subtypes | | |
| S1P1 and S1P5 B cell | | |
| distrubution T cell | | |
| distribution) | | |
| BGC20-0134 (targets | BTG PLC | Oral |
| Proinflammatory and anti- | | |
| inflammatory cytokines) | | |
| BIIB033 (targets LINGO-1 | BIOGEN | Intravenous infusion used in Phase I and Phase II |
| (“leucine-rich repeat and | | trials Subcutaneous injection used in Phase I trial |
| immunoglobulin-like domain- | | |
| containing, Nogo receptor- | | |
| interacting protein”)) | | |
| Cladribine (targets CD4+ T | MERCK SERONO | Oral |
| cells DNA synthesis and | | |
| repair E-selectin Intracellular | | |
| adhesion molecule-1 Pro- | | |
| inflammatory cytokines | | |
| interleukin 2 and interleukin | | |
| 2R Pro-inflammatory | | |
| cytokines interleukin 8 and | | |
| RANTES Cytokine secretion | | |
| Monocyte and lymphocyte | | |
| migration) | | |
| Cyclophosphamide (targets | BAXTER HEALTHCARE | Oral, monthly intravenous pulses |
| T cells, particularly CD4+ | CORPORATION | |
| helper T cells B cells) | | |
| Daclizumab (humanized | BIOGEN IDEC/ABBVIE | Projected to be IM injection once monthly |
| monoclonal antibody | BIOTHERAPEUTICS | |
| targeting CD25 Immune | | |
| modulator of T cells) | | |
| Dalfampridine (targets | ACORDA THERAPEUTICS/ | One tablet every 12 hours (extended release), 10 |
| Voltage-gated potassium | BIOGEN IDEC | mg twice a day |
| channels | | |
| Degenerin/epithelial sodium | | |
| channels L-type calcium | | |
| channels that contain | | |
| subunit Cavbeta3) | | |
| Dronabinol (targets | ABBVIE INC. | Oral |
| Cannabinoid receptor CB1 | | |
| Cannabinoid receptor CB2) | | |
| Firategrast (targets | GLAXOSMITHKLINE | Oral |
| Alpha4beta1 integrin) | | |
| GNbAC1MSRV-Env (targets | GENEURO SA/SERVIER | Intravenous infusion |
| envelope protein of the MS- | | |
| associated retrovirus) | | |
| Idebenone (targets Reactive | SANTHERA | Oral Dose in clinical trial for PPMS is 2250 mg per |
| oxygen species) | PHARMACEUTICALS | day (750 mg dose, 3 times per day) |
| Imilecleucel-T (targets | OPEXA THERAPEUTICS/ | Subcutaneous Given 5 times per year, according |
| Myelin-specific, autoreactive | MERCK SERONO | to information from the manufacturer |
| T cells) | | |
| Laquinimod | TEVA | Projected to be 0.6 mg or 1.2 mg oral tablet taken |
| | | daily |
| Masitinib (targets KIT (a | AB SCIENCE | Oral |
| stem cell factor, also called | | |
| c-KIT) receptor as well as | | |
| select other tyrosine kinases | | |
| Mast cells) | | |
| MEDI-551 (targets CD19, a | MEDIMMUNE | Intravenous Subcutaneous |
| B cell-specific antigen that is | | |
| part of the B cell receptor | | |
| complex and that functions | | |
| in determining the threshold | | |
| for B cell activation B cells | | |
| Plasmablasts, B cells that | | |
| express CD19 (but not | | |
| CD20) and that secrete large | | |
| quantities of antibodies; | | |
| depletion of plasmablasts | | |
| may be useful in | | |
| autoimmune diseases | | |
| involving pathogenic | | |
| autoantibodies) | | |
| Minocycline (targets T cells | VARIOUS | Oral Available as pellet-filled capsules and an oral |
| Microglia Leukocyte | | suspension |
| migration Matrix | | |
| metalloproteinases) | | |
| MIS416 (targets Innate | INNATE | Intravenous |
| immune system Pathogen- | IMMUNOTHERAPEUTICS | |
| associated molecular pattern | | |
| recognition receptors of the | | |
| innate immune system | | |
| Myeloid cells of the innate | | |
| immune system, which might | | |
| be able to remodel the | | |
| deregulated immune system | | |
| activity that occurs in SPMS) | | |
| Mycophenolate mofetil | MANUFACTURED BY | Oral |
| (targets Purine synthesis) | GENENTECH | |
| Naltrexone (targets Opioid | VARIOUS | Given at low doses (3 to 4.5 mg per day) in oral |
| receptors Toll-like receptor | | form as “Low-dose naltrexone” (or “LDN”) |
| 4) | | |
| Ocrelizumab and | ROCHE/GSK | Projected to be IV infusion |
| Ofatumumab (humanized | | |
| monoclonal antibodies | | |
| targeting CD20 B cell | | |
| suppression | | |
| ONO-4641 (targets | ONO PHARMACEUTICAL CO. | Oral |
| Sphingosine 1-phosphate | | |
| receptor) | | |
| Phenytoin (targets Sodium | PFIZER | Intravenous Intramuscular (less favored option) |
| channels) | | Oral |
| Ponesimod | ACTELION | To be determined |
| Raltegravir (targets | MERCK | Oral 400 mg tablet twice daily, according to |
| Retroviral integrase | | information from the manufacturer |
| Herpesvirus DNA packaging | | |
| terminase) | | |
| RHB-104 | REDHILL BIOPHARMA | 95 mg clarithromycin, 45 mg rifabutin, and 10 mg |
| | LIMITED | clofazimine |
| Riluzole (targets | COVIS PHARMA/SANOFI | Oral |
| Glutamatergic | | |
| neurotransmission | | |
| Glutamate uptake and | | |
| release Voltage-gated | | |
| sodium channels Protein | | |
| kinase C) | | |

[0764] MS disease progression may be most intensive, and most damaging, at the earliest stages of disease progression. Accordingly, counter to many reimbursement policies and physician practice in light of, for example, costs and side effect mitigation, it may be most beneficial for a patient's long term disease status to begin treatment with the most intensive DMTs, for instance so-called second-line therapies. In some embodiments, a patient is treated with a regimen of the Clec4C binding agent in combination with a second-line therapy. Such a combination is used to reduce the side effect profile of one or more second-line therapies. In some embodiments, the combination is used to reduce dose of frequency of administration of one or more second-line therapies. For example, the doses of agents listed in Table 6 provided above may be reduced by about 50%, or about 40%, or about 30%, or about 25% in the context of the combination and the/or the frequency of dosing may be decreased to be half as often, or a third as often or may be reduced from, for example, daily to every other day or weekly, every other day to weekly or bi-weekly, weekly to bi-weekly or monthly, etc. Accordingly, in some embodiments, the Clec4C binding agent increase patient adherence by allowing for more convenient treatment regimens. Further, some DMTs have a suggested lifetime dose limitation e.g. for mitoxantrone, the lifetime cumulative dose should be strictly limited to 140 mg/m2, or 2 to 3 years of therapy. In some embodiments, supplementation with the Clec4C binding agent preserves patient's access to mitoxantrone by allowing for lower or less frequent dosing with this DMT.

[0765] In some embodiments, the patient is a naive patient, who has not received treatment with one or more DMTs, and the Clec4C binding agent is used to buffer the side effects of a second-line therapy. Accordingly, the naive patient is able to benefit from the long-term benefits of a second-line therapy at disease outset. In some embodiments, the Clec4C binding agent is used as an entry therapy that precedes the use of a second-line therapy. For example, the Clec4C binding agent may be administered for an initial treatment period of about 3 months to stabilize disease and then the patient may be transitioned to a maintenance therapy of a second line agent.

[0766] It is generally believed that naive patients are more likely to respond to therapy as compared to patients that have received, and perhaps failed one or more DMT. In some embodiments, the Clec4C binding agent finds use in patients that have received, and perhaps failed one or more DMT. For example, in some embodiments, the Clec4C binding agent increases the therapeutic effect in patients that have received, and perhaps failed one or more DMT and may allow these patients to respond like naive patients.

[0767] In some embodiments, the patient has received or is receiving treatment with one or more DMTs and is not responding well. For example, the patient may be refractory or poorly responsive to one or more DMTs. In some embodiments, the patient is refractory, or poorly responsive to one or more of teriflunomide (AUBAGIO (GENZYME)); interferon beta-1a (AVONEX (BIOGEN IDEC); interferon beta-1b (BETASERON (BAYER HEALTHCARE PHARMACEUTICALS, INC.); glatiramer acetate (COPAXONE (TEVA NEUROSCIENCE); interferon beta-1b (EXTAVIA(NOVARTIS PHARMACEUTICALS CORP.); fingolimod (GILENYA(NOVARTIS PHARMACEUTICALS CORP.); alemtuzumab (LEMTRADA(GENZYME); mitoxantrone (NOVANTRONE (EMD SERONO); pegylated interferon beta-1a (PLEGRIDY (BIOGEN IDEC); interferon beta-1a (REBIF (EMD SERONO, INC.); dimethyl fumarate (BG-12) (TECFIDERA(BIOGEN IDEC); and natalizumab (TYSABRI (BIOGEN IDEC). In some embodiments, the one or more disclosed binding agent results in a therapeutic benefit of one or more DMTs in the patient and therefore reduces or eliminates the non-responsiveness to the DMT. For instance, this may spare the patient therapy with one or more DMTs at a higher dosing or frequency.

[0768] In patients with more aggressive disease, one approach is an induction treatment model, where a therapy with strong efficacy but strong safety concerns would be given first, followed by a maintenance therapy. An example of such a model might include initial treatment with alemtuzumab, followed by IFN-β, GA, or BG-12. In some embodiments, the one or more disclosed binding agent is used to prevent the need to switch therapies for maintenance. In some embodiments, the one or more disclosed binding agent is used to as maintenance therapy to one or more DMTs, including second line therapies. In some embodiments, the one or more disclosed binding agent is used to as first therapy in an induction, followed by another DMT as a maintenance therapy-such as, for example, a first line therapy.

[0769] In some embodiments, the one or more disclosed binding agent may be administered for an initial treatment period of about 3 months to stabilize disease and then the patient may be transitioned to a maintenance therapy of a first line agent.

[0770] In various embodiments, the one or more disclosed binding agent is used to reduce one or more side effects of a DMT, including without limitation any agent disclosed herein. For example, the one or more disclosed binding agent may be used in a regimen that allows dose sparing for one or more DMTs and therefore results in fewer side effects. For example, in some embodiments, the one or more disclosed binding agent may reduce one or more side effects of AUBAGIO or related agents, which may include hair thinning, diarrhea, flu, nausea, abnormal liver tests and unusual numbness or tingling in the hands or feet (paresthesias), levels of white blood cells, which can increase the risk of infections; increase in blood pressure; and severe liver damage. In some embodiments, the one or more disclosed binding agent may reduce one or more side effects of AVONEX or related agents which include flu-like symptoms following injection, depression, mild anemia, liver abnormalities, allergic reactions, and heart problems. In some embodiments, the one or more disclosed binding agent may reduce one or more side effects of BETASERON or related agents which include flu-like symptoms following injection, injection site reactions, allergic reactions, depression, liver abnormalities, and low white blood cell counts. In some embodiments, the one or more disclosed binding agent may reduce one or more side effects of COPAXONE or related agents which include injection site reactions, vasodilation (dilation of blood vessels); chest pain; a reaction immediately after injection, which includes anxiety, chest pain, palpitations, shortness of breath, and flushing. In some embodiments, the one or more disclosed binding agent may reduce one or more side effects of EXTAVIA or related agents which include flu-like symptoms following injection, injection site reactions, allergic reactions, depression, liver abnormalities, and low white blood cell counts. In some embodiments, the one or more disclosed binding agent may reduce one or more side effects of GILENYA or related agents which include headache, flu, diarrhea, back pain, liver enzyme elevations, cough, slowed heart rate following first dose, infections, and swelling in the eye. In some embodiments, the one or more disclosed binding agent may reduce one or more side effects of LEMTRADA or related agents which include rash, headache, fever, nasal congestion, nausea, urinary tract infection, fatigue, insomnia, upper respiratory tract infection, hives, itching, thyroid gland disorders, fungal Infection, pain in joints, extremities and back, diarrhea, vomiting, flushing, and infusion reactions (including nausea, hives, itching, insomnia, chills, flushing, fatigue, shortness of breath, changes in the sense of taste, indigestion, dizziness, pain). In some embodiments, the one or more disclosed binding agent may reduce one or more side effects of NOVANTRONE or related agents which include blue-green urine 24 hours after administration; infections, bone marrow suppression (fatigue, bruising, low blood cell counts), nausea, hair thinning, bladder infections, mouth sores, and serious liver and heart damage. In some embodiments, the one or more disclosed binding agent may reduce one or more side effects of PLEGRIDY or related agents which include flu-like symptoms following injection, injection site reactions, depression, mild anemia, liver abnormalities, allergic reactions, and heart problems. In some embodiments, the one or more disclosed binding agent may reduce one or more side effects of REBIF or related agents which include flu-like symptoms following injection, injection site reactions, liver abnormalities, depression, allergic reactions, and low red or white blood cell counts. In some embodiments, one or more disclosed binding agent may reduce one or more side effects of TECFIDERA or related agents which include flushing (sensation of heat or itching and a blush on the skin), gastrointestinal issues (nausea, diarrhea, abdominal pain), rash, protein in the urine, elevated liver enzymes; and reduction in blood lymphocyte (white blood cell) counts. In some embodiments, the one or more disclosed binding agent may reduce one or more side effects of TYSABRI or related agents which include headache, fatigue, urinary tract infections, depression, respiratory tract infections, joint pain, upset stomach, abdominal discomfort, diarrhea, vaginitis, pain in the arms or legs, rash, allergic or hypersensitivity reactions within two hours of infusion (dizziness, fever, rash, itching, nausea, flushing, low blood pressure, difficulty breathing, chest pain).

[0771] In an embodiment, the present invention relates to any agent that targets the spliceosome, including any component of the spliceosome, as additional therapeutic agents in the treatment of cancer.

[0772] In an embodiment, the present invention relates to any agent that targets Myc (i.e., anti-Myc therapeutics) as additional therapeutic agents in the treatment of cancer.

[0773] In some embodiments, inclusive of, without limitation, infectious disease applications, the present invention pertains to anti-infectives as additional therapeutic agents. In some embodiments, the anti-infective is an anti-viral agent including, but not limited to, Abacavir, Acyclovir, Adefovir, Amprenavir, Atazanavir, Cidofovir, Darunavir, Delavirdine, Didanosine, Docosanol, Efavirenz, Elvitegravir, Emtricitabine, Enfuvirtide, Etravirine, Famciclovir, and Foscarnet. In some embodiments, the anti-infective is an anti-bacterial agent including, but not limited to, cephalosporin antibiotics (cephalexin, cefuroxime, cefadroxil, cefazolin, cephalothin, cefaclor, cefamandole, cefoxitin, cefprozil, and ceftobiprole); fluoroquinolone antibiotics (cipro, Levaquin, floxin, tequin, avelox, and norflox); tetracycline antibiotics (tetracycline, minocycline, oxytetracycline, and doxycycline); penicillin antibiotics (amoxicillin, ampicilin, penicillin V, dicloxacillin, carbenicillin, vancomycin, and methicillin); monobactam antibiotics (aztreonam); and carbapenem antibiotics (ertapenem, doripenem, imipenem/cilastatin, and meropenem). In some embodiments, the anti-infectives include anti-malarial agents (e.g., chloroquine, quinine, mefloquine, primaquine, doxycycline, artemether/lumefantrine, atovaquone/proguanil and sulfadoxine/pyrimethamine), metronidazole, tinidazole, ivermectin, pyrantel pamoate, and albendazole.

[0774] In some embodiments, inclusive, without limitation, of autoimmune applications, the additional therapeutic agent is an immunosuppressive agent. In some embodiments, the immunosuppressive agent is an anti-inflammatory agent such as a steroidal anti-inflammatory agent or a non-steroidal anti-inflammatory agent (NSAID). Steroids, particularly the adrenal corticosteroids and their synthetic analogues, are well known in the art. Examples of corticosteroids useful in the present invention include, without limitation, hydroxyltriamcinolone, alpha-methyl dexamethasone, beta-methyl betamethasone, beclomethasone dipropionate, betamethasone benzoate, betamethasone dipropionate, betamethasone valerate, clobetasol valerate, desonide, desoxymethasone, dexamethasone, diflorasone diacetate, diflucortolone valerate, fluadrenolone, fluclorolone acetonide, flumethasone pivalate, fluosinolone acetonide, fluocinonide, flucortine butylester, fluocortolone, fluprednidene (fluprednylidene) acetate, flurandrenolone, halcinonide, hydrocortisone acetate, hydrocortisone butyrate, methylprednisolone, triamcinolone acetonide, cortisone, cortodoxone, flucetonide, fludrocortisone, difluorosone diacetate, fluradrenolone acetonide, medrysone, amcinafel, amcinafide, betamethasone and the balance of its esters, chloroprednisone, clocortelone, clescinolone, dichlorisone, difluprednate, flucloronide, flunisolide, fluoromethalone, fluperolone, fluprednisolone, hydrocortisone, meprednisone, paramethasone, prednisolone, prednisone, beclomethasone dipropionate. (NSAIDS) that may be used in the present invention, include but are not limited to, salicylic acid, acetyl salicylic acid, methyl salicylate, glycol salicylate, salicylmides, benzyl-2,5-diacetoxybenzoic acid, ibuprofen, fulindac, naproxen, ketoprofen, etofenamate, phenylbutazone, and indomethacin. In some embodiments, the immunosupressive agent may be cytostatics such as alkylating agents, antimetabolites (e.g., azathioprine, methotrexate), cytotoxic antibiotics, antibodies (e.g., basiliximab, daclizumab, and muromonab), anti-immunophilins (e.g., cyclosporine, tacrolimus, sirolimus), inteferons, opioids, TNF binding proteins, mycophenolates, and small biological agents (e.g., fingolimod, myriocin). Additional anti-inflammatory agents are described, for example, in U.S. Pat. No. 4,537,776, the entire contents of which is incorporated by reference herein.

[0775] In some embodiments, the present invention pertains to various agents used for treating obesity as additional therapeutic agents. Illustrative agents used for treating obesity include, but are not limited to, orlistat (e.g. ALL1, XENICAL), loracaserin (e.g. BELVIQ), phentermine-topiramate (e.g. QSYMIA), sibutramme (e.g. REDUCTIL or MERJDIA), rimonabant (ACOMPLLA), exenatide (e.g. BYETTA), pramlintide (e.g. SYMLIN) phentermine, benzphetamine, diethylpropion, phendimetrazme, bupropion, and metformin. Agents that interfere with the body's ability to absorb specific nutrients in food are among the additional agents, e.g. orlistat (e.g. ALU, XENICAL), glucomannan, and guar gum. Agents that suppress appetite are also among the additional agents, e.g. catecholamines and their derivatives (such as phenteimine and other amphetamine-based drugs), various antidepressants and mood stabilizers (e.g. bupropion and topiramate), anorectics (e.g. dexedrine, digoxin). Agents that increase the body's metabolism are also among the additional agents.

[0776] In some embodiments, additional therapeutic agents may be selected from among appetite suppressants, neurotransmitter reuptake inhibitors, dopaminergic agonists, serotonergic agonists, modulators of GABAergic signaling, anticonvulsants, antidepressants, monoamine oxidase inhibitors, substance P (NK1) receptor antagonists, melanocortin receptor agonists and antagonists, lipase inhibitors, inhibitors of fat absorption, regulators of energy intake or metabolism, cannabinoid receptor modulators, agents for treating addiction, agents for treating metabolic syndrome, peroxisome proliferator-activated receptor (PPAR) modulators; dipcptidyl peptidase 4 (DPP-4) antagonists, agents for treating cardiovascular disease, agents for treating elevated triglyceride levels, agents for treating low HDL, agents for treating hypercholesterolemia, and agents for treating hypertension. Some agents for cardiovascular disease include statins (e.g. lovastatin, atorvastatin, fluvastatin, rosuvastatin, simvastatin and pravastatin) and omega-3 agents (e.g. LOVAZA, EPANQVA, VASCEPA, esterified omega-3's in general, fish oils, krill oils, algal oils). In some embodiments, additional agents may be selected from among amphetamines, benzodiazepines, suifonyl ureas, meglitinides, thiazolidinediones, biguanides, beta-blockers, XCE inhibitors, diuretics, nitrates, calcium channel blockers, phenlermine, sibutramine, iorcaserin, cetilistat, rimonabant, taranabant, topiramate, gabapentin, valproate, vigabatrin, bupropion, tiagabine, sertraline, fluoxetine, trazodone, zonisamide, methylphenidate, varenicline, naltrexone, diethylpropion, phendimetrazine, rcpaglini.de, nateglinide, glimepiride, metformin, pioglitazone, rosiglilazone, and sitagliptin.

[0777] In some embodiments, the present invention pertains to an agent used for treating diabetes as additional therapeutic agents. Illustrative anti-diabetic agents include, but are not limited to, sulfonylurea (e.g. DYMELOR (acetohexamide), DIABINESE (chlorpropamide), ORINASE (tolbutamide), and TOLINASE (tolazamide), GLUCOTROL (glipizide), GLUCOTROL XL (extended release), DIABETA(glyburide), MICRONASE (glyburide), GLYNASE PRESTAB (glyburide), and AMARYL (glimepiride); a Biguanide (e.g. metformin (GLUCOPHAGE, GLUCOPHAGE XR, RIOMET, FORTAMET, and GLUMETZA)); a thiazolidinedione (e.g. ACTOS (pioglitazone) and AVANDIA(rosiglitazone); an alpha-glucosidase inhibitor (e.g., PRECOSE (acarbose) and GLYSET (miglitol); a Meglitinide (e.g., PRANDIN (repaglinide) and STARLIX (nateglinide)); a Dipeptidyl peptidase IV (DPP-IV) inhibitor (e.g., JANUVIA(sitagliptin), NESINA(alogliptin), ONGLYZA(saxagliptin), and TRADJENTA(linagliptin)); Sodium-glucose co-transporter 2 (SGLT2) inhibitor (e.g. INVOKANA(canaglifozin)); and a combination pill (e.g. GLUCOVANCE, which combines glyburide (a sulfonylurea) and metformin, METAGLIP, which combines glipizide (a sulfonylurea) and metformin, and AVANDAMET, which uses both metformin and rosiglitazone (AVANDIA) in one pill, KAZANO (alogliptin and metformin), OSENI (alogliptin plus pioglitazone), METFORMIN oral, ACTOS oral, BYETTA subcutaneous, JANUVIA oral, WELCHOL oral, JANUMET oral, glipizide oral, glimepiride oral, GLUCOPHAGE oral, LANTUS subcutaneous, glyburide oral, ONGLYZA oral, AMARYI oral, LANTUS SOLOSTAR subcutaneous, BYDUREON subcutaneous, LEVEMIR FLEXPEN subcutaneous, ACTOPLUS MET oral, GLUMETZA oral, TRADJENTA oral, bromocriptine oral, KOMBIGLYZE XR oral, INVOKANA oral, PRANDIN oral, LEVEMIR subcutaneous, PARLODEL oral, pioglitazone oral, NOVOLOG subcutaneous, NOVOLOG FLEXPEN subcutaneous, VICTOZA 2-PAK subcutaneous, HUMALOG subcutaneous, STARLIX oral, FORTAMET oral, GLUCOVANCE oral, GLUCOPHAGE XR oral, NOVOLOG Mix 70-30 FLEXPEN subcutaneous, GLYBURIDE-METFORMIN oral, acarbose oral, SYMLINPEN 60 subcutaneous, GLUCOTROI XL oral, NOVOLIN R inj, GLUCOTROL oral, DUETACT oral, sitagliptin oral, SYMLINPEN 120 subcutaneous, HUMALOG KWIKPEN subcutaneous, JANUMET XR oral, GLIPIZIDE-METFORMIN oral, CYCLOSET oral, HUMALOG MIX 75-25 subcutaneous, nateglinide oral, HUMALOG Mix 75-25 KWIKPEN subcutaneous, HUMULIN 70/30 subcutaneous, PRECOSE oral, APIDRA subcutaneous, Humulin R inj, Jentadueto oral, Victoza 3-Pak subcutaneous, Novolin 70/30 subcutaneous, NOVOLIN N subcutaneous, insulin detemir subcutaneous, glyburide micronized oral, GLYNASE oral, HUMULIN N subcutaneous, insulin glargine subcutaneous, RIOMET oral, pioglitazone-metformin oral, APIDRA SOLOSTAR subcutaneous, insulin lispro subcutaneous, GLYSET oral, HUMULIN 70/30 Pen subcutaneous, colesevelam oral, sitagliptin-metformin oral, DIABETA oral, insulin regular human inj, HUMULIN N Pen subcutaneous, exenatide subcutaneous, HUMALOG Mix 50-50 KWIKPEN subcutaneous, liraglutide subcutaneous, KAZANO oral, repaglinide oral, chlorpropamide oral, insulin aspart subcutaneous, NOVOLOG Mix 70-30 subcutaneous, HUMALOG Mix 50-50 subcutaneous, saxagliptin oral, ACTOPLUS Met XR oral, miglitol oral, NPH insulin human recomb subcutaneous, insulin NPH and regular human subcutaneous, tolazamide oral, mifepristone oral, insulin aspart protam-insulin aspart subcutaneous, repaglinide-metformin oral, saxagliptin-metformin oral, linagliptin-metformin oral, NESINA oral, OSENI oral, tolbutamide oral, insulin lispro protamine and lispro subcutaneous, pramlintide subcutaneous, insulin glulisine subcutaneous, pioglitazone-glimepiride oral, PRANDIMET oral, NOVOLOG PenFill subcutaneous, linagliptin oral, exenatide microspheres subcutaneous, KORLYM oral, alogliptin oral, alogliptin-pioglitazone oral, alogliptin-metformin oral, canagliflozin oral, Lispro (HUMALOG); Aspart (NOVOLOG); Glulisine (APIDRA); Regular (NOVOLIN R or HUMULIN R); NPH (NOVOLIN N or HUMULIN N); Glargine (LANTUS); Detemir (LEVEMIR); HUMULIN or NOVOLIN 70/30; and NOVOLOG Mix 70/30 HUMALOG Mix 75/25 or 50/50.

[0778] In some embodiments, the present invention relates to combination therapy with a blood transfusion. For instance, the present compositions may supplement a blood transfusion. In some embodiments, the present invention relates to combination therapy with iron supplements.

[0779] In some embodiments, the present invention relates to combination therapy with one or more EPO-based agents. For example, the present compositions may be used as an adjuvant to other EPO-based agents. In some embodiments, the present compositions are used as a maintenance therapy to other EPO-based agents. Other EPO-based agents include the following: epoetin alfa, including without limitation, DARBEPOETIN (ARANESP), EPOCEPT (LUPIN PHARMA), NANOKINE (NANOGEN PHARMACEUTICAL), EPOFIT (INTAS PHARMA), EPOGEN (AMGEN), EPOGIN, EPREX, (JANSSEN-CILAG), BINOCRIT (SANDOZ), PROCRIT; epoetin beta, including without limitation, NEORECORMON (HOFFMANN-LA ROCHE), RECORMON, Methoxy polyethylene glycol-epoetin beta (MIRCERA, ROCHE); epoetin delta, including without limitation, DYNEPO (erythropoiesis stimulating protein, SHIRE PLC); epoetin omega, including without limitation, EPOMAX; epoetin zeta, including without limitation, SILAPO (STADA) and RETACRIT (HOSPIRA) and other EPOs, including without limitation, EPOCEPT (LUPIN PHARMACEUTICALS), EPOTRUST (PANACEA BIOTEC LTD), ERYPRO SAFE (BIOCON LTD.), REPOITIN (SERUM INSTITUTE OF INDIA LIMITED), VINTOR (EMCURE PHARMACEUTICALS), EPOFIT (INTAS PHARMA), ERYKINE (INTAS BIOPHARMACEUTICA), WEPOX (WOCKHARDT BIOTECH), ESPOGEN (LG LIFE SCIENCES), RELIPOIETIN (RELIANCE LIFE SCIENCES), SHANPOIETIN (SHANTHA BIOTECHNICS LTD), ZYROP (CADILA HEALTHCARE LTD.), EPIAO (RHUEPO) (SHENYANG SUNSHINE PHARMACEUTICAL CO. LTD), CINNAPOIETIN (CINNAGEN).

[0780] In some embodiments, the present invention relates to combination therapy with one or more immune-modulating agents, for example, without limitation, agents that modulate immune checkpoint. In various embodiments, the immune-modulating agent targets one or more of PD-1, PD-L1, and PD-L2. In various embodiments, the immune-modulating agent is PD-1 inhibitor. In various embodiments, the immune-modulating agent is an antibody specific for one or more of PD-1, PD-L1, and PD-L2. For instance, in some embodiments, the immune-modulating agent is an antibody such as, by way of non-limitation, nivolumab, (ONO-4538/BMS-936558, MDX1106, OPDIVO, BRISTOL MYERS SQUIBB), pembrolizumab (KEYTRUDA, MERCK), pidilizumab (CT-011, CURE TECH), MK-3475 (MERCK), BMS 936559 (BRISTOL MYERS SQUIBB), MPDL3280A(ROCHE). In some embodiments, the immune-modulating agent targets one or more of CD137 or CD137L. In various embodiments, the immune-modulating agent is an antibody specific for one or more of CD137 or CD137L. For instance, in some embodiments, the immune-modulating agent is an antibody such as, by way of non-limitation, urelumab (also known as BMS-663513 and anti-4-1BB antibody). In some embodiments, the present chimeric protein or chimeric protein complex is combined with urelumab (optionally with one or more of nivolumab, lirilumab, and urelumab) for the treatment of solid tumors and/or B-cell non-Hodgkins lymphoma and/or head and neck cancer and/or multiple myeloma. In some embodiments, the immune-modulating agent is an agent that targets one or more of CTLA-4, AP2M1, CD80, CD86, SHP-2, and PPP2R5A. In various embodiments, the immune-modulating agent is an antibody specific for one or more of CTLA-4, AP2M1, CD80, CD86, SHP-2, and PPP2R5A. For instance, in some embodiments, the immune-modulating agent is an antibody such as, by way of non-limitation, ipilimumab (MDX-010, MDX-101, Yervoy, BMS) and/or tremelimumab (Pfizer). In some embodiments, the present chimeric protein or chimeric protein complex is combined with ipilimumab (optionally with bavituximab) for the treatment of one or more of melanoma, prostate cancer, and lung cancer. In various embodiments, the immune-modulating agent targets CD20. In various embodiments, the immune-modulating agent is an antibody specific CD20. For instance, in some embodiments, the immune-modulating agent is an antibody such as, by way of non-limitation, Ofatumumab (GENMAB), obinutuzumab (GAZYVA), AME-133v (APPLIED MOLECULAR EVOLUTION), Ocrelizumab (GENENTECH), TRU-015 (TRUBION/EMERGENT), veltuzumab (IMMU-106).

[0781] In some embodiments, the present chimeric protein or chimeric protein complex acts synergistically when used in combination with Chimeric Antigen Receptor (CAR) T-cell therapy. In an illustrative embodiment, the chimeric protein or chimeric protein complex acts synergistically when used in combination with CAR T-cell therapy in treating tumor or cancer. In an embodiment, the chimeric protein or chimeric protein complex acts synergistically when used in combination with CAR T-cell therapy in treating blood-based tumors. In an embodiment, the chimeric protein or chimeric protein complex acts synergistically when used in combination with CAR T-cell therapy in treating solid tumors. For example, use of the chimeric protein or chimeric protein complex and CAR T-cells may act synergistically to reduce or eliminate the tumor or cancer, or slow the growth and/or progression and/or metastasis of the tumor or cancer. In various embodiments, the chimeric protein or chimeric protein complex of the invention induces CAR T-cell division. In various embodiments, the chimeric protein or chimeric protein complex of the invention induces CAR T-cell proliferation. In various embodiments, the chimeric protein or chimeric protein complex of the invention prevents anergy of the CAR T cells.

[0782] In various embodiments, the CAR T-cell therapy comprises CAR T cells that target antigens (e.g., tumor antigens) such as, but not limited to, carbonic anhydrase IX (CAIX), 5T4, CD19, CD20, CD22, CD27, CD30, CD33, CD38, CD47, CD70, CS1, CD138, Lewis-Y, L1-CAM, MUC16, ROR-1, IL13Ra2, gp100, prostate stem cell antigen (PSCA), prostate-specific membrane antigen (PSMA), B-cell maturation antigen (BCMA), human papillomavirus type 16 E6 (HPV-16 E6), CD171, folate receptor alpha (FR-a), GD2, human epidermal growth factor receptor 2 (HER2), mesothelin, EGFRvlll, fibroblast activation protein (FAP), carcinoembryonic antigen (CEA), and vascular endothelial growth factor receptor 2 (VEGF-R2), as well as other tumor antigens well known in the art. Additional illustrative tumor antigens include, but are not limited to MART-1/Melan-A, gp 100, Dipeptidyl peptidase IV (DPPIV), adenosine deaminase-binding protein (ADAbp), cyclophilin b, Colorectal associated antigen (CRC)-0017-1A/GA733, Carcinoembryonic Antigen (CEA) and its immunogenic epitopes CAP-1 and CAP-2, etv6, aml1, Prostate Specific Antigen (PSA) and its immunogenic epitopes PSA-1, PSA-2, and PSA-3, T-cell receptor/CD3-zeta chain, MAGE-family of tumor antigens (e.g., MAGE-A1, MAGE-A2, MAGE-A3, MAGE-A4, MAGE-A5, MAGE-A6, MAGE-A7, MAGE-A8, MAGE-A9, MAGE-A10, MAGE-A11, MAGE-A12, MAGE-Xp2 (MAGE-B2), MAGE-Xp3 (MAGE-B3), MAGE-Xp4 (MAGE-B4), MAGE-C1, MAGE-C2, MAGE-C3, MAGE-C4, MAGE-C5), GAGE-family of tumor antigens (e.g., GAGE-1, GAGE-2, GAGE-3, GAGE-4, GAGE-5, GAGE-6, GAGE-7, GAGE-8, GAGE-9), BAGE, RAGE, LAGE-1, NAG, GnT-V, MUM-1, CDK4, tyrosinase, p53, MUC family, HER2/neu, p21ras, RCAS1, a-fetoprotein, E-cadherin, a-catenin, B-catenin and y-catenin, p120ctn, gp100 Pmel117, PRAME, NY-ESO-1, cdc27, adenomatous polyposis coli protein (APC), fodrin, Connexin 37, Ig-idiotype, p15, gp75, GM2 and GD2 gangliosides, viral products such as human papilloma virus proteins, Smad family of tumor antigens, Imp-1, NA, EBV-encoded nuclear antigen (EBNA)-1, brain glycogen phosphorylase, SSX-1, SSX-2 (HOM-MEL-40), SSX-1, SSX-4, SSX-5, SCP-1 CT-7, c-erbB-2, CD19, CD37, CD56, CD70, CD74, CD138, AGS16, MUC1, GPNMB, Ep-CAM, PD-L1, and PD-L2.

[0783] Illustrative CAR T-cell therapy include, but are not limited to, JCAR014 (Juno Therapeutics), JCAR015 (Juno Therapeutics), JCAR017 (Juno Therapeutics), JCAR018 (Juno Therapeutics), JCAR020 (Juno Therapeutics), JCAR023 (Juno Therapeutics), JCAR024 (Juno Therapeutics), CTL019 (Novartis), KTE-C19 (Kite Pharma), BPX-401 (Bellicum Pharmaceuticals), BPX-501 (Bellicum Pharmaceuticals), BPX-601 (Bellicum Pharmaceuticals), bb2121 (Bluebird Bio), CD-19 Sleeping Beauty cells (Ziopharm Oncology), UCART19 (Cellectis), UCART123 (Cellectis), UCART38 (Cellectis), UCARTCS1 (Cellectis), OXB-302 (Oxford BioMedica, MB-101 (Mustang Bio) and CAR T-cells developed by Innovative Cellular Therapeutics.

[0784] In some embodiments, the present invention relates to combination therapy with one or more chimeric agents described in WO 2013/10779, WO 2015/007536, WO 2015/007520, WO 2015/007542, and WO 2015/007903, the entire contents of which are hereby incorporated by reference in their entireties.

[0785] In some embodiments, the chimeric protein or chimeric protein complex described herein, include derivatives that are modified, i.e., by the covalent attachment of any type of molecule to the composition such that covalent attachment does not prevent the activity of the composition. For example, but not by way of limitation, derivatives include composition that have been modified by, inter alia, glycosylation, lipidation, acetylation, pegylation, phosphorylation, amidation, derivatization by known protecting/blocking groups, proteolytic cleavage, linkage to a cellular ligand or other protein, etc. Any of numerous chemical modifications can be carried out by known techniques, including, but not limited to specific chemical cleavage, acetylation, formylation, metabolic synthesis of tunicamycin, etc.

[0786] In still other embodiments, the chimeric protein or chimeric protein complex described herein further comprise a cytotoxic agent, comprising, in illustrative embodiments, a toxin, a chemotherapeutic agent, a radioisotope, and an agent that causes apoptosis or cell death. Such agents may be conjugated to a composition described herein.

[0787] The chimeric protein or chimeric protein complex described herein may thus be modified post-translationally to add effector moieties such as chemical linkers, detectable moieties such as for example fluorescent dyes, enzymes, substrates, bioluminescent materials, radioactive materials, and chemiluminescent moieties, or functional moieties such as for example streptavidin, avidin, biotin, a cytotoxin, a cytotoxic agent, and radioactive materials.

[0788] Illustrative cytotoxic agents include, but are not limited to, methotrexate, aminopterin, 6-mercaptopurine, 6-thioguanine, cytarabine, 5-fluorouracil decarbazine; alkylating agents such as mechlorethamine, thioepa chlorambucil, melphalan, carmustine (BSNU), mitomycin C, lomustine (CCNU), 1-methylnitrosourea, cyclothosphamide, mechlorethamine, busulfan, dibromomannitol, streptozotocin, mitomycin C, cis-dichlorodiamine platinum (II) (DDP) cisplatin and carboplatin (paraplatin); anthracyclines include daunorubicin (formerly daunomycin), doxorubicin (adriamycin), detorubicin, carminomycin, idarubicin, epirubicin, mitoxantrone and bisantrene; antibiotics include dactinomycin (actinomycin D), bleomycin, calicheamicin, mithramycin, and anthramycin (AMC); and antimytotic agents such as the vinca alkaloids, vincristine and vinblastine. Other cytotoxic agents include paclitaxel (taxol), ricin, pseudomonas exotoxin, gemcitabine, cytochalasin B, gramicidin D, ethidium bromide, emetine, etoposide, tenoposide, colchicin, dihydroxy anthracin dione, 1-dehydrotestosterone, glucocorticoids, procaine, tetracaine, lidocaine, propranolol, puromycin, procarbazine, hydroxyurea, asparaginase, corticosteroids, mytotane (O,P′-(DDD)), interferons, and mixtures of these cytotoxic agents.

[0789] Further cytotoxic agents include, but are not limited to, chemotherapeutic agents such as carboplatin, cisplatin, paclitaxel, gemcitabine, calicheamicin, doxorubicin, 5-fluorouracil, mitomycin C, actinomycin D, cyclophosphamide, vincristine, bleomycin, VEGF antagonists, EGFR antagonists, platins, taxols, irinotecan, 5-fluorouracil, gemcytabine, leucovorine, steroids, cyclophosphamide, melphalan, vinca alkaloids (e.g., vinblastine, vincristine, vindesine and vinorelbine), mustines, tyrosine kinase inhibitors, radiotherapy, sex hormone antagonists, selective androgen receptor modulators, selective estrogen receptor modulators, PDGF antagonists, TNF antagonists, IL-1 antagonists, interleukins (e.g. IL-12 or IL-2), IL-12R antagonists, Toxin conjugated monoclonal antibodies, tumor antigen specific monoclonal antibodies, Erbitux, Avastin, Pertuzumab, anti-CD20 antibodies, Rituxan, ocrelizumab, ofatumumab, DXL625, HERCEPTIN®, or any combination thereof. Toxic enzymes from plants and bacteria such as ricin, diphtheria toxin and Pseudomonas toxin may be conjugated to the therapeutic agents (e.g. antibodies) to generate cell-type-specific-killing reagents (Youle, et al., Proc. Nat'l Acad. Sci. USA 77:5483 (1980); Gilliland, et al., Proc. Nat'l Acad. Sci. USA 77:4539 (1980); Krolick, et al., Proc. Nat'l Acad. Sci. USA 77:5419 (1980).

[0790] Other cytotoxic agents include cytotoxic ribonucleases as described by Goldenberg in U.S. Pat. No. 6,653,104. Embodiments of the invention also relate to radioimmunoconjugates where a radionuclide that emits alpha or beta particles is stably coupled to the chimeric protein, with or without the use of a complex-forming agent. Such radionuclides include beta-emitters such as Phosphorus-32, Scandium-47, Copper-67, Gallium-67, Yttrium-88, Yttrium-90, Iodine-125, Iodine-131, Samarium-153, Lutetium-177, Rhenium-186 or Rhenium-188, and alpha-emitters such as Astatine-211, Lead-212, Bismuth-212, Bismuth-213 or Actinium-225.

[0791] Illustrative detectable moieties further include, but are not limited to, horseradish peroxidase, acetylcholinesterase, alkaline phosphatase, beta-galactosidase and luciferase. Further illustrative fluorescent materials include, but are not limited to, rhodamine, fluorescein, fluorescein isothiocyanate, umbelliferone, dichlorotriazinylamine, phycoerythrin and dansyl chloride. Further illustrative chemiluminescent moieties include, but are not limited to, luminol. Further illustrative bioluminescent materials include, but are not limited to, luciferin and aequorin. Further illustrative radioactive materials include, but are not limited to, Iodine-125, Carbon-14, Sulfur-35, Tritium and Phosphorus-32

### Methods of Treatment

[0792] Methods and compositions described herein have application to treating various diseases and disorders, including, but not limited to cancer, infections, immune disorders, anemia, autoimmune diseases, cardiovascular diseases, wound healing, ischemia-related diseases, neurodegenerative diseases, metabolic diseases and many other diseases and disorders.

[0793] Further, any of the present agents may be for use in the treating, or the manufacture of a medicament for treating, various diseases and disorders, including, but not limited to cancer, infections, immune disorders, inflammatory diseases or conditions, and autoimmune diseases.

[0794] In some embodiments, the present invention relates to the treatment of, or a patient having one or more of chronic granulomatous disease, osteopetrosis, idiopathic pulmonary fibrosis, Friedreich's ataxia, atopic dermatitis, Chagas disease, cancer, heart failure, autoimmune disease, sickle cell disease, thalassemia, blood loss, transfusion reaction, diabetes, vitamin B12 deficiency, collagen vascular disease, Shwachman syndrome, thrombocytopenia purpura, Celiac disease, endocrine deficiency state such as hypothyroidism or Addison's disease, autoimmune disease such as Crohn's Disease, systemic lupus erythematosis, rheumatoid arthritis or juvenile rheumatoid arthritis, ulcerative colitis immune disorders such as eosinophilic fasciitis, hypoimmunoglobulinemia, or thymoma/thymic carcinoma, graft versus host disease, preleukemia, Nonhematologic syndrome (e.g., Down's, Dubowwitz, Seckel), Felty syndrome, hemolytic uremic syndrome, myelodysplasic syndrome, nocturnal paroxysmal hemoglobinuria, osteomyelofibrosis, pancytopenia, pure red-cell aplasia, Schoenlein-Henoch purpura, malaria, protein starvation, menorrhagia, systemic sclerosis, liver cirrhosis, hypometabolic states, and congestive heart failure.

[0795] In some embodiments, the present invention relates to the treatment of, or a patient having one or more of chronic granulomatous disease, osteopetrosis, idiopathic pulmonary fibrosis, Friedreich's ataxia, atopic dermatitis, Chagas disease, mycobacterial infections, cancer, scleroderma, hepatitis, hepatitis C, septic shock, and rheumatoid arthritis.

[0796] In some embodiments, the present invention relates to the treatment of, or a patient having cancer. As used herein, cancer refers to any uncontrolled growth of cells that may interfere with the normal functioning of the bodily organs and systems, and includes both primary and metastatic tumors. Primary tumors or cancers that migrate from their original location and seed vital organs can eventually lead to the death of the subject through the functional deterioration of the affected organs. A metastasis is a cancer cell or group of cancer cells, distinct from the primary tumor location, resulting from the dissemination of cancer cells from the primary tumor to other parts of the body. Metastases may eventually result in death of a subject. For example, cancers can include benign and malignant cancers, polyps, hyperplasia, as well as dormant tumors or micrometastases.

[0797] Illustrative cancers that may be treated include, but are not limited to, carcinomas, e.g. various subtypes, including, for example, adenocarcinoma, basal cell carcinoma, squamous cell carcinoma, and transitional cell carcinoma), sarcomas (including, for example, bone and soft tissue), leukemias (including, for example, acute myeloid, acute lymphoblastic, chronic myeloid, chronic lymphocytic, and hairy cell), lymphomas and myelomas (including, for example, Hodgkin and non-Hodgkin lymphomas, light chain, non-secretory, MGUS, and plasmacytomas), and central nervous system cancers (including, for example, brain (e.g. gliomas (e.g. astrocytoma, oligodendroglioma, and ependymoma), meningioma, pituitary adenoma, and neuromas, and spinal cord tumors (e.g. meningiomas and neurofibroma).

[0798] Illustrative cancers that may be treated include, but are not limited to, basal cell carcinoma, biliary tract cancer; bladder cancer; bone cancer; brain and central nervous system cancer; breast cancer; cancer of the peritoneum; cervical cancer; choriocarcinoma; colon and rectum cancer; connective tissue cancer; cancer of the digestive system; endometrial cancer; esophageal cancer; eye cancer; cancer of the head and neck; gastric cancer (including gastrointestinal cancer); glioblastoma; hepatic carcinoma; hepatoma; intra-epithelial neoplasm; kidney or renal cancer; larynx cancer; leukemia; liver cancer; lung cancer (e.g., small-cell lung cancer, non-small cell lung cancer, adenocarcinoma of the lung, and squamous carcinoma of the lung); melanoma; myeloma; neuroblastoma; oral cavity cancer (lip, tongue, mouth, and pharynx); ovarian cancer; pancreatic cancer; prostate cancer; retinoblastoma; rhabdomyosarcoma; rectal cancer; cancer of the respiratory system; salivary gland carcinoma; sarcoma; skin cancer; squamous cell cancer; stomach cancer; testicular cancer; thyroid cancer; uterine or endometrial cancer; cancer of the urinary system; vulval cancer; lymphoma including Hodgkin's and non-Hodgkin's lymphoma, as well as B-cell lymphoma (including low grade/follicular non-Hodgkin's lymphoma (NHL); small lymphocytic (SL) NHL; intermediate grade/follicular NHL; intermediate grade diffuse NHL; high grade immunoblastic NHL; high grade lymphoblastic NHL; high grade small non-cleaved cell NHL; bulky disease NHL; mantle cell lymphoma; AIDS-related lymphoma; and Waldenstrom's Macroglobulinemia; chronic lymphocytic leukemia (CLL); acute lymphoblastic leukemia (ALL); Hairy cell leukemia; chronic myeloblastic leukemia; as well as other carcinomas and sarcomas; and post-transplant lymphoproliferative disorder (PTLD), as well as abnormal vascular proliferation associated with phakomatoses, edema (e.g. that associated with brain tumors), and Meigs' syndrome.

[0799] In various embodiments, the present invention relates to the treatment of Myc-driven cancers, i.e., cancer cells that overexpress Myc. In some embodiments, the cancer cells overexpress any one of c-Myc, N-Myc, and/or L-Myc. In some embodiments, methods of the invention renders the cancer cells susceptible to treatment with any one of the anti-cancer therapeutic agents described herein. In some embodiments, methods of the invention reduce the transcriptional activities of the cancer cells.

[0800] In some embodiments, the present invention relates to the treatment of, or a patient having a microbial infection and/or chronic infection. Illustrative infections include, but are not limited to, Chagas disease, HIV/AIDS, tuberculosis, osteomyelitis, hepatitis B, hepatitis C, Epstein-Barr virus or parvovirus, T cell leukemia virus, bacterial overgrowth syndrome, fungal or parasitic infections.

[0801] In various embodiments, the present compositions are used to treat or prevent one or more inflammatory diseases or conditions, such as inflammation, acute inflammation, chronic inflammation, respiratory disease, atherosclerosis, restenosis, asthma, allergic rhinitis, atopic dermatitis, septic shock, rheumatoid arthritis, inflammatory bowel disease, inflammatory pelvic disease, pain, ocular inflammatory disease, celiac disease, Leigh Syndrome, Glycerol Kinase Deficiency, Familial eosinophilia (FE), autosomal recessive spastic ataxia, laryngeal inflammatory disease; Tuberculosis, Chronic cholecystitis, Bronchiectasis, Silicosis and other pneumoconioses.

[0802] In various embodiments, the present compositions are used to treat or prevent one or more autoimmune diseases or conditions, such as multiple sclerosis, diabetes mellitus, lupus, celiac disease, Crohn's disease, ulcerative colitis, Guillain-Barre syndrome, scleroderms, Goodpasture's syndrome, Wegener's granulomatosis, autoimmune epilepsy, Rasmussen's encephalitis, Primary biliary sclerosis, Sclerosing cholangitis, Autoimmune hepatitis, Addison's disease, Hashimoto's thyroiditis, Fibromyalgia, Menier's syndrome; transplantation rejection (e.g., prevention of allograft rejection) pernicious anemia, rheumatoid arthritis, systemic lupus erythematosus, dermatomyositis, Sjogren's syndrome, lupus erythematosus, multiple sclerosis, myasthenia gravis, Reiter's syndrome, Grave's disease, and other autoimmune diseases.

[0803] In various embodiments, the present compositions are used to treat, control or prevent cardiovascular disease, such as a disease or condition affecting the heart and vasculature, including but not limited to, coronary heart disease (CHD), cerebrovascular disease (CVD), aortic stenosis, peripheral vascular disease, atherosclerosis, arteriosclerosis, myocardial infarction (heart attack), cerebrovascular diseases (stroke), transient ischaemic attacks (TIA), angina (stable and unstable), atrial fibrillation, arrhythmia, vavular disease, and/or congestive heart failure.

[0804] In various embodiments, the present compositions are used to treat or prevent one or more metabolic-related disorders. In various embodiments, the present invention is useful for the treatment, controlling or prevention of diabetes, including Type 1 and Type 2 diabetes and diabetes associated with obesity. The compositions and methods of the present invention are useful for the treatment or prevention of diabetes-related disorders, including without limitation diabetic nephropathy, hyperglycemia, impaired glucose tolerance, insulin resistance, obesity, lipid disorders, dyslipidemia, hyperlipidemia, hypertriglyceridemia, hypercholesterolemia, low HDL levels, high LDL levels, atherosclerosis and its sequelae, vascular restenosis, irritable bowel syndrome, inflamatory bowel disease, including Crohn's disease and ulcerative colitis, other inflammatory conditions, pancreatitis, abdominal obesity, neurodegenerative disease, retinopathy, neoplastic conditions, adipose cell tumors, adipose cell carcinomas, such as liposarcoma, prostate cancer and other cancers, including gastric, breast, bladder and colon cancers, angiogenesis, Alzheimer's disease, psoriasis, high blood pressure, Metabolic Syndrome (e.g. a person has three or more of the following disorders: abdominal obesity, hypertriglyceridemia, low HDL cholesterol, high blood pressure, and high fasting plasma glucose), ovarian hyperandrogenism (polycystic ovary syndrome), and other disorders where insulin resistance is a component, such as sleep apnea. The compositions and methods of the present invention are useful for the treatment, control, or prevention of obesity, including genetic or environmental, and obesity-related disorders. The obesity-related disorders herein are associated with, caused by, or result from obesity. Examples of obesity-related disorders include obesity, diabetes, overeating, binge eating, and bulimia, hypertension, elevated plasma insulin concentrations and insulin resistance, dyslipidemia, hyperlipidemia, endometrial, breast, prostate, kidney and colon cancer, osteoarthritis, obstructive sleep apnea, gallstones, heart disease, abnormal heart rhythms and arrythmias, myocardial infarction, congestive heart failure, coronary heart disease, sudden death, stroke, polycystic ovary disease, craniopharyngioma, Prader-Willi Syndrome, Frohlich's syndrome, GH-deficient subjects, normal variant short stature, Turner's syndrome, and other pathological conditions showing reduced metabolic activity or a decrease in resting energy expenditure as a percentage of total fat-free mass, e.g, children with acute lymphoblastic leukemia. Further examples of obesity-related disorders are Metabolic Syndrome, insulin resistance syndrome, reproductive hormone abnormalities, sexual and reproductive dysfunction, such as impaired fertility, infertility, hypogonadism in males and hirsutism in females, fetal defects associated with maternal obesity, gastrointestinal motility disorders, such as obesity-related gastro-esophageal reflux, respiratory disorders, such as obesity-hypoventilation syndrome (Pickwickian syndrome), breathlessness, cardiovascular disorders, inflammation, such as systemic inflammation of the vasculature, arteriosclerosis, hypercholesterolemia, lower back pain, gallbladder disease, hyperuricemia, gout, and kidney cancer, and increased anesthetic risk. The compositions and methods of the present invention are also useful to treat Alzheimer's disease.

[0805] In various embodiments, the present compositions are used to treat or prevent one or more respiratory diseases, such as idiopathic pulmonary fibrosis (IPF), asthma, chronic obstructive pulmonary disease (COPD), bronchiectasis, allergic rhinitis, sinusitis, pulmonary vasoconstriction, inflammation, allergies, impeded respiration, respiratory distress syndrome, cystic fibrosis, pulmonary hypertension, pulmonary vasoconstriction, emphysema, Hantavirus pulmonary syndrome (HPS), Loeffler's syndrome, Goodpasture's syndrome, Pleurisy, pneumonitis, pulmonary edema, pulmonary fibrosis, Sarcoidosis, complications associated with respiratory syncitial virus infection, and other respiratory diseases.

[0806] In some embodiments, the present invention is used to treat or prevent one or more neurodegenerative disease. Illustrative neurodegenerative diseases include, but are not limited to, Friedreich's ataxia, multiple sclerosis (including without limitation, benign multiple sclerosis; relapsing-remitting multiple sclerosis (RRMS); secondary progressive multiple sclerosis (SPMS); progressive relapsing multiple sclerosis (PRMS); and primary progressive multiple sclerosis (PPMS)), Alzheimer's. disease (including, without limitation, Early-onset Alzheimer's, Late-onset Alzheimer's, and Familial Alzheimer's disease (FAD), Parkinson's disease and parkinsonism (including, without limitation, Idiopathic Parkinson's disease, Vascular parkinsonism, Drug-induced parkinsonism, Dementia with Lewy bodies, Inherited Parkinson's, Juvenile Parkinson's), Huntington's disease, Amyotrophic lateral sclerosis (ALS, including, without limitation, Sporadic ALS, Familial ALS, Western Pacific ALS, Juvenile ALS, Hiramaya Disease).

[0807] In various embodiments, the present chimeric proteins or chimeric protein complexes find use in treating wounds, e.g., a non-healing wound, an ulcer, a burn, or frostbite, a chronic or acute wound, open or closed wound, internal or external wound (illustrative external wounds are penetrating and non-penetrating wound. In various embodiments, the present chimeric proteins or chimeric protein complexes find use in treating ischemia, by way of non-limiting example, ischemia associated with acute coronary syndrome, acute lung injury (ALI), acute myocardial infarction (AMI), acute respiratory distress syndrome (ARDS), arterial occlusive disease, arteriosclerosis, articular cartilage defect, aseptic systemic inflammation, atherosclerotic cardiovascular disease, autoimmune disease, bone fracture, bone fracture, brain edema, brain hypoperfusion, Buerger's disease, burns, cancer, cardiovascular disease, cartilage damage, cerebral infarct, cerebral ischemia, cerebral stroke, cerebrovascular disease, chemotherapy-induced neuropathy, chronic infection, chronic mesenteric ischemia, claudication, congestive heart failure, connective tissue damage, contusion, coronary artery disease (CAD), critical limb ischemia (CLI), Crohn's disease, deep vein thrombosis, deep wound, delayed ulcer healing, delayed wound-healing, diabetes (type I and type II), diabetic neuropathy, diabetes induced ischemia, disseminated intravascular coagulation (DIC), embolic brain ischemia, frostbite, graft-versus-host disease, hereditary hemorrhagic telengiectasiaischemic vascular disease, hyperoxic injury, hypoxia, inflammation, inflammatory bowel disease, inflammatory disease, injured tendons, intermittent claudication, intestinal ischemia, ischemia, ischemic brain disease, ischemic heart disease, ischemic peripheral vascular disease, ischemic placenta, ischemic renal disease, ischemic vascular disease, ischemic-reperfusion injury, laceration, left main coronary artery disease, limb ischemia, lower extremity ischemia, myocardial infarction, myocardial ischemia, organ ischemia, osteoarthritis, osteoporosis, osteosarcoma, Parkinson's disease, peripheral arterial disease (PAD), peripheral artery disease, peripheral ischemia, peripheral neuropathy, peripheral vascular disease, pre-cancer, pulmonary edema, pulmonary embolism, remodeling disorder, renal ischemia, retinal ischemia, retinopathy, sepsis, skin ulcers, solid organ transplantation, spinal cord injury, stroke, subchondral-bone cyst, thrombosis, thrombotic brain ischemia, tissue ischemia, transient ischemic attack (TIA), traumatic brain injury, ulcerative colitis, vascular disease of the kidney, vascular inflammatory conditions, von Hippel-Lindau syndrome, or wounds to tissues or organs

[0808] In various embodiments, the present invention relates to the treatment of one or more of anemia, including anemia resulting from chronic kidney disease (e.g. from dialysis) and/or an anti-cancer agent (e.g. chemotherapy and/or HIV treatment (e.g. Zidovudine (INN) or azidothymidine (AZT)), inflammatory bowel disease (e.g. Crohn's disease and ulcer colitis), anemia linked to inflammatory conditions (e.g. arthritis, lupus, IBD), anemia linked to diabetes, schizophrenia, cerebral malaria, as aplastic anemia, and myelodysplasia from the treatment of cancer (e.g. chemotherapy and/or radiation), and various myelodysplastic syndrome diseases (e.g. sickle cell anemia, hemoglobin SC disease, hemoglobin C disease, alpha- and beta-thalassemias, neonatal anemia after premature birth, and comparable conditions).

[0809] In some embodiments, the present invention relates to the treatment of, or a patient having anemia, i.e. a condition in which the number of red blood cells and/or the amount of hemoglobin found in the red blood cells is below normal. In various embodiments, the anemia may be acute or chronic. For example, the present anemias include but are not limited to iron deficiency anemia, renal anemia, anemia of chronic diseases/inflammation, pernicious anemia such as macrocytic achylic anemia, juvenile pernicious anemia and congenital pernicious anemia, cancer-related anemia, anti-cancer-related anemia (e.g. chemotherapy-related anemia, radiotherapy-related anemia), pure red cell aplasia, refractory anemia with excess of blasts, aplastic anemia, X-lined siderobalstic anemia, hemolytic anemia, sickle cell anemia, anemia caused by impaired production of ESA, myelodysplasia syndromes, hypochromic anemia, microcytic anemia, sideroblastic anemia, autoimmune hemolytic anemia, Cooley's anemia, Mediterranean anemia, Diamond Blackfan anemia, Fanconi's anemia and drug-induced immune hemolytic anemia. Anemia may cause serious symptoms, including hypoxia, chronic fatigue, lack of concentration, pale skin, low blood pressure, dizziness and heart failure.

[0810] In some embodiments, the present invention relates to the treatment of anemia resulting from chronic renal failure. In some embodiments, the present invention relates to the treatment of anemia resulting from the use of one or more renal replacement therapies, inclusive of dialysis, hemodialysis, peritoneal dialysis, hemofiltration, hemodiafiltration, and renal transplantation.

[0811] In some embodiments, the present invention relates to the treatment of anemia in patients with chronic kidney disease who are not on dialysis. For instance, the present invention relates to patients in stage 1 CKD, or stage 2 CKD, or stage 3 CKD, or stage 4 CKD, or stage 5 CKD. In some embodiments, the present patient is stage 4 CKD or stage 5 CKD. In some embodiments, the present patient has undergone a kidney transplant. In some embodiments, the present invention relates to the treatment of anemia is a patient having an acute kidney injury (AKI).

[0812] In some embodiments, the anemia is induced by chemotherapy. For instance, the chemotherapy may be any myelosuppressive chemotherapy. In some embodiment, the chemotherapy is one or more of Revlimid, Thalomid, dexamethasone, Adriamycin and Doxil. In some embodiments, the chemotherapy is one or more platinum-based drugs including cisplatin (e.g. PLATINOL) and carboplatin (e.g. PARAPLATIN). In some embodiments, the chemotherapy is any one of the chemotherapeutic agents described herein. In some embodiments, the chemotherapy is any agent described in Groopman et al. J Natl Cancer Inst (1999) 91 (19): 1616-1634, the contents of which are hereby incorporated by reference in their entireties. In some embodiments, the present compositions and methods are used in the treatment of chemotherapy-related anemia in later stage cancer patients (e.g. a stage IV, or stage III, or stage II cancer). In some embodiments, the present compositions and methods are used in the treatment of chemotherapy-related anemia in cancer patients receiving dose-dense chemotherapy or other aggressive chemotherapy regimens.

[0813] In some embodiments, the present invention relates to the treatment of anemia in a patient having one or more blood-based cancers, such as leukemia, lymphoma, and multiple myeloma. Such cancers may affect the bone marrow directly. Further, the present invention relates to metastatic cancer that has spread to the bone or bone marrow. In some embodiments, the present invention relates to the treatment of anemia in a patient undergoing radiation therapy. Such radiation therapy may damage the bone marrow, lowering its ability to make red blood cells. In further embodiments, the present invention relates to the treatment of anemia in a patient having a reduction or deficiency of one or more of iron, vitamin B12, and folic acid. In further embodiments, the present invention relates to the treatment of anemia in a patient having excessive bleeding including without limitation, after surgery or from a tumor that is causing internal bleeding. In further embodiments, the present invention relates to the treatment of anemia in a patient having anemia of chronic disease.

[0814] In some embodiments, the present methods and compositions stimulate red blood cell production. In some embodiments, the present methods and compositions stimulate division and differentiation of committed erythroid progenitors in the bone marrow.

[0815] Certain embodiments of the present invention are particularly useful for treating chemotherapy-induced anemia in cancer patients. In some embodiments, the present methods and compositions allows for continued administration of the chimeric protein or chimeric protein complex after a cancer patient's chemotherapy is finished. In some embodiments, the present methods and compositions allows for treatment of a cancer patient without dose reduction relative to a non-cancer patient. In some embodiments, the present methods and compositions allows for treatment of a cancer patient receiving chemotherapy and considered curable. In various embodiments, the cancer patient has one or more of a history of blood clots, recent surgery, prolonged periods of bed rest or limited activity, and treatment with a chemotherapeutic agent.

### Kits

[0816] The invention also provides kits for the administration of any agent described herein (e.g. the chimeric protein or chimeric protein complex with or without various additional therapeutic agents). The kit is an assemblage of materials or components, including at least one of the inventive pharmaceutical compositions described herein. Thus, in some embodiments, the kit contains at least one of the pharmaceutical compositions described herein.

[0817] The exact nature of the components configured in the kit depends on its intended purpose. In one embodiment, the kit is configured for the purpose of treating human subjects.

[0818] Instructions for use may be included in the kit. Instructions for use typically include a tangible expression describing the technique to be employed in using the components of the kit to effect a desired outcome, such as to treat cancer. Optionally, the kit also contains other useful components, such as, diluents, buffers, pharmaceutically acceptable carriers, syringes, catheters, applicators, pipetting or measuring tools, bandaging materials or other useful paraphernalia as will be readily recognized by those of skill in the art.

[0819] The materials and components assembled in the kit can be provided to the practitioner stored in any convenience and suitable ways that preserve their operability and utility. For example, the components can be provided at room, refrigerated or frozen temperatures. The components are typically contained in suitable packaging materials. In various embodiments, the packaging material is constructed by well-known methods, preferably to provide a sterile, contaminant-free environment. The packaging material may have an external label which indicates the contents and/or purpose of the kit and/or its components.

### Definitions

[0820] As used herein, “a,” “an,” or “the” can mean one or more than one.

[0821] Unless specifically stated or obvious from context, as used herein, the term “or” is understood to be inclusive and covers both “or” and “and”.

[0822] Further, the term “about” when used in connection with a referenced numeric indication means the referenced numeric indication plus or minus up to 10% of that referenced numeric indication, e.g., within (plus or minus) 10%, 9%, 8%, 7%, 6%, 5%, 4%, 3%, 2%, 1%, 0.5%, 0.1%, 0.05%, or 0.01% of the stated value. For example, the language “about 50” covers the range of 45 to 55.

[0823] An “effective amount,” when used in connection with medical uses is an amount that is effective for providing a measurable treatment, prevention, or reduction in the rate of pathogenesis of a disease of interest.

[0824] As used herein, something is “decreased” if a read-out of activity and/or effect is reduced by a significant amount, such as by at least about 10%, at least about 20%, at least about 30%, at least about 40%, at least about 50%, at least about 60%, at least about 70%, at least about 80%, at least about 90%, at least about 95%, at least about 97%, at least about 98%, or more, up to and including at least about 100%, in the presence of an agent or stimulus relative to the absence of such modulation. As will be understood by one of ordinary skill in the art, in some embodiments, activity is decreased and some downstream read-outs will decrease but others can increase.

[0825] Conversely, activity is “increased” if a read-out of activity and/or effect is increased by a significant amount, for example by at least about 10%, at least about 20%, at least about 30%, at least about 40%, at least about 50%, at least about 60%, at least about 70%, at least about 80%, at least about 90%, at least about 95%, at least about 97%, at least about 98%, or more, up to and including at least about 100% or more, at least about 2-fold, at least about 3-fold, at least about 4-fold, at least about 5-fold, at least about 6-fold, at least about 7-fold, at least about 8-fold, at least about 9-fold, at least about 10-fold, at least about 50-fold, at least about 100-fold, in the presence of an agent or stimulus, relative to the absence of such agent or stimulus.

[0826] As referred to herein, all compositional percentages are by weight of the total composition, unless otherwise specified. As used herein, the word “include,” and its variants, is intended to be non-limiting, such that recitation of items in a list is not to the exclusion of other like items that may also be useful in the compositions and methods of this technology. Similarly, the terms “can” and “may” and their variants are intended to be non-limiting, such that recitation that an embodiment can or may comprise certain elements or features does not exclude other embodiments of the present technology that do not contain those elements or features.

[0827] Although the open-ended term “comprising,” as a synonym of terms such as including, containing, or having, is used herein to describe and claim the invention, the present invention, or embodiments thereof, may alternatively be described using alternative terms such as “consisting of” or “consisting essentially of.”

[0828] As used herein, the words “preferred” and “preferably” refer to embodiments of the technology that afford certain benefits, under certain circumstances. However, other embodiments may also be preferred, under the same or other circumstances. Furthermore, the recitation of one or more preferred embodiments does not imply that other embodiments are not useful, and is not intended to exclude other embodiments from the scope of the technology.

[0829] The amount of compositions described herein needed for achieving a therapeutic effect may be determined empirically in accordance with conventional procedures for the particular purpose. Generally, for administering therapeutic agents for therapeutic purposes, the therapeutic agents are given at a pharmacologically effective dose. A “pharmacologically effective amount,” “pharmacologically effective dose,” “therapeutically effective amount,” or “effective amount” refers to an amount sufficient to produce the desired physiological effect or amount capable of achieving the desired result, particularly for treating the disorder or disease. An effective amount as used herein would include an amount sufficient to, for example, delay the development of a symptom of the disorder or disease, alter the course of a symptom of the disorder or disease (e.g., slow the progression of a symptom of the disease), reduce or eliminate one or more symptoms or manifestations of the disorder or disease, and reverse a symptom of a disorder or disease. Therapeutic benefit also includes halting or slowing the progression of the underlying disease or disorder, regardless of whether improvement is realized.

[0830] Effective amounts, toxicity, and therapeutic efficacy can be determined by standard pharmaceutical procedures in cell cultures or experimental animals, e.g., for determining the LD50 (the dose lethal to about 50% of the population) and the ED50 (the dose therapeutically effective in about 50% of the population). The dosage can vary depending upon the dosage form employed and the route of administration utilized. The dose ratio between toxic and therapeutic effects is the therapeutic index and can be expressed as the ratio LD50/ED50. In some embodiments, compositions and methods that exhibit large therapeutic indices are preferred. A therapeutically effective dose can be estimated initially from in vitro assays, including, for example, cell culture assays. Also, a dose can be formulated in animal models to achieve a circulating plasma concentration range that includes the IC50 as determined in cell culture, or in an appropriate animal model. Levels of the described compositions in plasma can be measured, for example, by high performance liquid chromatography. The effects of any particular dosage can be monitored by a suitable bioassay. The dosage can be determined by a physician and adjusted, as necessary, to suit observed effects of the treatment.

[0831] In certain embodiments, the effect will result in a quantifiable change of at least about 10%, at least about 20%, at least about 30%, at least about 50%, at least about 70%, or at least about 90%. In some embodiments, the effect will result in a quantifiable change of about 10%, about 20%, about 30%, about 50%, about 70%, or even about 90% or more. Therapeutic benefit also includes halting or slowing the progression of the underlying disease or disorder, regardless of whether improvement is realized.

[0832] As used herein, “methods of treatment” are equally applicable to use of a composition for treating the diseases or disorders described herein and/or compositions for use and/or uses in the manufacture of a medicaments for treating the diseases or disorders described herein.

### Examples

[0833] In some Examples, two variants of the knob-in-hole technology are used: Ridgway (derived from Ridgway et al., Protein Engineering 1996; 9:617-621) and Merchant (derived from Merchant et al., Nature Biotechnology 1998; 16:677-681). Sequences are referred to as Fc1 and Fc2 (Ridgway hole and knob, respectively) and Fc3 and Fc4 (Merchant hole and knob, respectively). The ‘standard’ effector-mutation in the Ridgway constructs is LALA-PG (P329G), unless stated otherwise. For the Merchant constructs the LALA-KQ (K322Q) mutation is used.
[0834] Fc1: Ridgway hole: hlgG1 Fc_L234A_L235A_P329G_Y407T having the following amino acid sequence:

(SEQ ID NO: 1461)
DKTHTCPPCPAPEAAGGPSVFLFPPKPKDTLMISRTPEVTCVVVDVSHED
PEVKFNWYVDGVEVHNAKTKPREEQYNSTYRVVSVLTVLHQDWLNGKEYK
CKVSNKALPAPIEKTISKAKGQPREPQVYTLPPSRDELTKNQVSLTCLVK
GFYPSDIAVEWESNGQPENNYKTTPPVLDSDGSFFLTSKLTVDKSRWQQG
NVFSCSVMHEALHNHYTQKSLSLSPGK

[0835] Fc2: Ridgway knob: hlgG1 Fc_L234A_L235A_P329G_T366Y having the following amino acid sequence:

(SEQ ID NO: 1462)
DKTHTCPPCPAPEAAGGPSVFLFPPKPKDTLMISRTPEVTCVVVDVSHED
PEVKFNWYVDGVEVHNAKTKPREEQYNSTYRVVSVLTVLHQDWLNGKEYK
CKVSNKALPAPIEKTISKAKGQPREPQVYTLPPSRDELTKNQVSLYCLVK
GFYPSDIAVEWESNGQPENNYKTTPPVLDSDGSFFLYSKLTVDKSRWQQG
NVFSCSVMHEALHNHYTQKSLSLSPGK

[0836] Fc3: Merchant hole: hlgG1 Fc_L234A_L235A_K322Q_Y349C_T366S_L368A_Y407V having the following amino acid sequence:

(SEQ ID NO: 1463)
DKTHTCPPCPAPEAAGGPSVFLFPPKPKDTLMISRTPEVTCVVVDVSHED
PEVKFNWYVDGVEVHNAKTKPREEQYNSTYRVVSVLTVLHQDWLNGKEYK
CKVSNKALPAPIEKTISKAKGQPREPQVCTLPPSRDELTKNQVSLSCAVK
GFYPSDIAVEWESNGQPENNYKTTPPVLDSDGSFFLVSKLTVDKSRWQQG
NVFSCSVMHEALHNHYTQKSLSLSPGK

[0837] Fc4: Merchant knob: hlgG1 Fc_L234A_L235A_K322Q_S354C_T366W having the following amino acid sequence:

(SEQ ID NO: 1464)
DKTHTCPPCPAPEAAGGPSVFLFPPKPKDTLMISRTPEVTCVVVDVSHED
PEVKFNWYVDGVEVHNAKTKPREEQYNSTYRVVSVLTVLHQDWLNGKEYK
CKVSNKALPAPIEKTISKAKGQPREPQVYTLPPCRDELTKNQVSLWCLVK
GFYPSDIAVEWESNGQPENNYKTTPPVLDSDGSFFLYSKLTVDKSRWQQG
NVFSCSVMHEALHNHYTQKSLSLSPGK

[0838] The terms “AcTaferon” or “AFN” is occasionally used herein to reference an interferon-based chimera.

[0839] In the following examples, unless noted, mutations to IFN are relative to human IFN-α2.

### Example 1: Treatment of EAE with AFN Targeted to Plasmacytoid and Conventional Dendritic Cells

[0840] The purpose of this experiment was, inter alia, to assess developed AcTaferons (Activity-on-Target IFNs, “AFN”), IFN-based immunocytokines, for delaying disease via cell-specific targeting without mortalitiy and hematological consequences. The results show that, without limitation, when comparing Clec9A-, XCR1- and SiglecH-targeting, targeting AFN to plasmacytoid (p) and conventional (c) DC is superior and non-toxic compared to WT mIFN.

### Experimental Autoimmune Encephalitis (EAE) Model and Treatments

[0841] All animal experiments followed the Federation of European Laboratory Animal Science Association (FELASA) guidelines and were approved by the Ethical Committee of Ghent University. Male 8 weeks old C57BI/6J mice were immunized s.c. with 200 μg MOG35-55 in Complete Freund's Adjuvant (CFA) containing 1 mg heat-killed Mycobacterium tuberculosis. Two hours and 2 days later 50 ng Pertussis Toxin was injected intraperitoneally. First signs of disease typically started on day 10-12. IFN or AFN intraperitoneal treatments were initiated on day 7 or 12 and lasted till day 25. Mice were daily weighed and scored. A score ranging from 0 to 2 indicates progressive tail paralysis, with 1.5 for a partially limp tail, 2 for a completely limp tail. Score 2.5 was given if the animal no longer spreads its hind toes, score 3 for a waddled walk. Scores above 3 indicate increasing paralysis, with 4 for complete hind limb paralysis. If fore limb paralysis was evident, score 5 was given and the animal was euthanized. Batf3−/− and CD11c-IFNAR1−/−mice were used to determine cDC1 involvement and IFN signaling, anti-PDCA1 treatment (BioXCell, 250 g/mouse given on days 7, 8, 10, 12 after immunization) for pDC contribution. To evaluate immune checkpoint involvement, mice were treated with anti-PDL1 camelid VHH (20 mg/kg daily) or anti-CTLA4 Ab (BioXCell, 10 mg/kg, every 2-3 days). Treatment groups number 5-7, experiments were repeated at least once. Differences were assessed using one-way or two-way ANOVA followed by Dunnett's or Tukey's multiple-comparison test. Survival curves were compared using the log-rank test. GraphPad Prism software was used for statistical analysis. All values depicted are mean±s.e.m.; * P<0.05, ** P<0.01, *** P<0.001 and **** P<0.0001 compared with PBS treated animals, unless otherwise indicated.

### Generation of AcTaferons

[0842] Camelid VHHs binding mouse Clec9A and CD8 were generated. Importantly, they did not interfere with cross-presentation of DC or T cell activation, respectively. In addition, cDC1 were targeted using XCL1, the ligand for XCR1, engineered for better XCR1 binding (removing 25 C-terminal amino acids and mutating V21C and A59C), while pDC were specifically targeted with SiglecH camelid VHHs. The IFNa2 mutant in mice, hlFNaQ124R, is a human IFNα mutant breaching the cross-species barrier and thus weakly active on murine cells (1/100 vs WT mlFNα).

[0843] Haematological and FACS analysis

[0844] One day after the last treatment, blood was collected from the tail vein in EDTA-coated microvette tubes (Sarstedt), and analyzed in a Hemavet 950FS whole blood counter (Drew Scientific, Waterbury, USA). Spinal cord sections were dissected and stained with H&E, Luxol fast blue (LFB, for myelination assessment), and antibodies against amyloid precursor protein APP (evaluating axonal damage) or CD3, B220 or MAC-3 for visualizing infiltrating T and B cells and macrophages, respectively. Flow cytometry was done for spleen and lymph node (LN) cells. Doublets were excluded and living cells were selected based on live-dead stain (Invitrogen). pDC (CD3-CD19-B220+SiglecH+) and cDC1 (CD3-CD19-CD11b-CD11c+MHCII+XCR1+Clec9A+) percentages were determined, and the intracellular expression of designated cytokines determined. For regulatory T cells (T_{regs}), the CD3+CD4+CD25+FoxP3+ population was analyzed. For regulatory B cells (Bregs), the CD3-CD19+CD5+CD1d+ population. Fc receptors were blocked using anti-CD16/CD32 Ab. Fluorescence minus one (FMO) and isotype controls were included to allow adequate analysis. Samples were acquired on an Attune Nxt Acoustic Focusing Cytometer (Life Technologies) and analyzed using FlowJo software.

### Results

[0845] The results show that Wild Type mlFNα11 dose-dependently protects against EAE, but is associated with severe toxicity. The active EAE model using C57BL/6 mice immunized with MOG35-55 peptide is very robust and uniform and hence widely employed for understanding disease pathology and validating potential novel treatments. In this model, the positive standard was first defined by daily treatment with WT mlFNα11. 5000 IU WT mIFNα had a minor disease-delaying effect (FIG. 1, panels A-B), comparable to mIFNβ effects published before. A very high dose of WT mIFNα (1.000.000 IU) was capable of significantly delaying the onset and progression of disease (FIG. 1, panels A-B), but the treatment itself caused 60% mortality (FIG. 1, panel C) and severe hematological deficits in the 40% surviving mice, including dramatic lymphopenia (FIG. 1, panel D), neutropenia (FIG. 1, panel E), monocytopenia (FIG. 1, panel F), anemia (FIG. 1, panel G), as well as severe thrombocytopenia (FIG. 1, panel H), and increased mean platelet volume (MPV, FIG. 1, panel I), indicative of platelet destruction.

[0846] However, the results further show that targeting IFN activity to DC protects even better than WT mlFN without the toxicity effects. In the classic MS/EAE scenario, processing and presentation of self-antigen(s) by antigen presenting cells (APC) causes activation and expansion of peripheral T cells. These auto-reactive T cells migrate across the blood brain barrier (BBB), enter the CNS, and induce disease by activating glial cells and attracting and activating other immune cells, ultimately resulting in severe damage of the central neurons and their myelin sheaths and axons. It was long believed that CD4+ T cells are primary inducers and mediators in MS. However, not CD4+but CD8+ T cells are the predominant population in human MS lesions, and a role for myelin-specific CD8+ T cells was suggested. Intriguingly, these may develop into either cytotoxic or immunosuppressive CD8+ lymphocytes. Several cell types have been suggested to be responsible for the beneficial effects of IFN in MS. These include T lymphocytes and APC such as dendritic cells (DC). To evaluate their involvement, AFN was targeted to CD8+ cells or to Clec9A+DC. In contrast to WT mIFNα, 5000 IU Clec9A-AFN significantly protected (FIG. 2, panels A-D) without mortality (FIG. 2, panel E) or hematological problems (FIG. 2, panels F-H). Interestingly, CD8-AFN had no influence on clinical score, onset of disease, or paralysis (FIG. 2, panel A-C), but had a detrimental effect on body weight loss (FIG. 2, panel D). Notably, Clec9A-AFN treatment provided long-term protection against EAE progression and the development of paralysis (FIG. 2, panel I), also when given after disease onset (FIG. 2, panel J).

[0847] The results show, inter alia, that DC-targeted protection is dependent on PDL-1 and CTLA-4. For APC to activate T lymphocytes, a well-defined set of interactions and signals is necessary. Positive signals include TCR-MHC/antigen interaction, binding of costimulatory molecules (CD28-CD80/CD86), and the production of stimulatory cytokines. However, the absence of negative interactions (immune checkpoints) is at least equally important. In MS patients, IFNβ therapy increases PDL-1 levels. In addition, blocking CTLA-4 can exacerbate EAE sensitivity or induce EAE sensitivity in non-susceptible mice. Hence, Clec9A-AFN treated EAE mice were treated simultaneously with neutralizing anti-PDL1 camelid VHHs, or anti-CTLA-4 Abs. Both immune checkpoint inhibitors prevented the protective effect of Clec9A-AFN (FIG. 2, panel K).

[0848] The results further show that DC-targeted protection is mainly mediated by pDC. DCs are typically divided in three major subsets: Clec9A⁺XCR1⁺ type 1 conventional/myeloid DC (cDC1), CD11b⁺SIRPα⁺ type 2 conventional/myeloid DC (cDC2), and plasmacytoid pDC. In humans, only cDC1 are Clec9A+. In mice, however, not only XCR1⁺cDC1, but also pDC are Clec9A⁺. To verify the involvement of the XCR1+cDC1, they were specifically targeted using XCL1-AFN. Surprisingly, comparison of Clec9A-AFN and XCL1-AFN indicated that not only cDC1 but also pDC may be important (FIG. 2, panel L). As cDC1 specifically require the Batf3 transcription factor for their differentiation, deletion of Batf3 ablates their development. Experiments in Batf3^{-/-} mice indicated not only their susceptibility for EAE, but also the ability of Clec9A-AFN to prevent disease progression, spinal cord damage and inflammation in Batf3^{-/-} animals even better than in WT mice (FIG. 3, panel A-C), suggesting the critical involvement of pDC rather than cDC1. Consequently, pDC were depleted using anti-PDCA1 antibodies. Unexpectedly, pDC depletion did not affect Clec9A-AFN protection, not in WT mice (FIG. 3, panel D), but also not in Batf3−/− mice (FIG. 3, panel E). To clarify these results, the presence of cDC1 and pDC were analyzed in the various mice and experimental conditions described in this Example 1. Surprisingly, whereas naive Batf3−/− mice were indeed cDC1-deficient, cDC1 were present in the EAE-developing Batf3−/− animals (FIG. 3, panel F), probably due to compensatory Batf-induced cDC1 development, which has already been reported in response to intracellular pathogens, mediated by IL-12 and IFN-γ. Hence, the results obtained in Batf3^{-/-} mice are not conclusive with regard to cDC1 involvement. In addition, when analyzing pDC after anti-PDCA1 treatment, evidence was found for pDC depletion in lymph nodes (LNs) during EAE progression in mice receiving PBS therapy (FIG. 3, panel G), but not in spleens (FIG. 3, panel H), or in LNs of mice treated with Clec9A-AFN (FIG. 3, panel G). Together, these results indicate that the pDC depletion experiments cannot provide conclusive interpretations either. Nevertheless, in CD11c-IFNAR1-1-mice, where IFNAR1 and IFN signaling are absent in cDC but present in pDC, Clec9A-AFN can still protect, clearly providing evidence for critical pDC involvement in Clec9A-AFN mediated protection.

[0849] However, the results further show that targeting pDC is superior to targeting cDC1. To further corroborate the involvement of cDC1 versus pDC, camelid VHHs specific for SiglecH, a validated pDC marker in mice were generated. As Clec4C resembles SiglecH in that it is a marker for pDCs, it can be considered to be a human surrogate of SiglecH.

[0850] SiglecH-AFN treatment was equally proficient as Clec9A-AFN to protect against EAE development, at least till day 12 (FIG. 3, panel J). Combining SiglecH-AFN with Clec9A-AFN did not add to Clec9A-AFN efficacy (FIG. 3, panel J). These results suggest the critical early involvement of pDC, as well as the additional need for cDC1 later during disease progression. To investigate this possibility, XCL1-AFN (targeting only cDC1) was added to the SiglecH-AFN therapy (targeting only pDC), starting on day 11. Additional XCL1-AFN treatments enabled SiglecH-AFN therapy to become as effective as Clec9A-AFN (FIG. 3, panel K). Corroborating the specificity of XCL1-AFN, its additive effect on SiglecH-AFN therapy was absent in CD11c-IFNAR1−/− mice that lack IFNAR1 on cDC only (FIG. 3, panel L). Thus, targeting IFN activity to pDC and cDC1, using DC-specific AFNs, can very efficiently protect against EAE progression, without the development of toxic side effects.

[0851] The results also show that targeting DC induces a systemic tolerogenic response. To evaluate how DC-targeted AFN could provide protection in EAE, pDC and cDC1 numbers were analyzed as well as tolerization markers, and evidence of additional tolerogenic cells. While splenic pDC numbers were increased after Clec9A-AFN (FIG. 3, panel H and FIG. 4, panel A), there was no increase in LN (FIG. 3, panel G). Determination of SiglecH+pDC numbers after SiglecH-AFN treatment showed very little pDC, probably due to the endocytic nature of SiglecH, which is very efficiently internalized after engagement. To analyze the tolerogenic nature of the pDCs, their production of the potent immunosuppressive determinants TGFβ, IL-10, and indoleamine 2,3-dioxygenase (IDO) was determined. While there was no increase in IL-10, Clec9A-AFN and SiglecH-AFN robustly enhanced both TGFβ and IDO in splenic pDC (FIG. 4, panel B). In contrast to pDC, cDC1 numbers were not different in spleen or LNs (not shown). To dampen immune responses, also other regulatory cell types such as Treg and/or Breg may be involved. Treg numbers were increased in spleens of Clec9A-AFN treated EAE mice, and the percentage of TGFβ and IL-10 producing T_{regs} was enhanced by both Clec9A-AFN and SiglecH-AFN (FIG. 4, panel C). While Breg numbers were not statistically increased, significantly more of them produced immunosuppressive IL-10 and TGFβ (FIG. 4, panel D). Together, these data indicate a strong and systemic tolerizing effect of DC-targeted AFNs (FIG. 5)

[0852] In conclusion, the results support the development of a novel, generic and safe strategy for the in vivo tolerization of DCs as a successful means to control autoimmunity. Indeed, targeting IFN activity specifically to pDC (and later also cDC1) during EAE induced a strong tolerogenic phenotype, evident in both pDC, Treg and Breg, that efficiently dampened EAE disease progression without toxic side effects. DC-specific targeting of IFN activity not only abolished all systemic adverse effects and toxicities, it also dissected positive from negative IFN effects and may thus represent a better and harmless MS therapy.

### Example 2: Generation and Characterization of Human Clec4C VHH

[0853] The extracellular domain of human Clec4C (aa 45-213; SEQ ID 1226) was amplified and cloned in the pMET7 expression-vector as follows: pMET7-SlgK-His-Clec4C (EC). The resulting plasmid was transfected in Hek293F cells (ThermoFisher) using PEI 25K. After 5-6 days, supernatant was collected after centrifugation of cells and filter-filtration. Recombinant proteins were purified using Ni Excell resin (GE Healthcare) according to the manufacturer's guidelines and imidazole removed from elution fractions using PD-10 columns (GE Healthcare).

[0854] Sequence of extracellular domain of human CLEC4C (aa 45-213):

(SEQ ID NO: 1226)
NFMYSKTVKRLSKLREYQQYHPSLTCVMEGKDIEDWSCCPTPWTSFQSSC
YFISTGMQSWTKSQKNCSVMGADLVVINTREEQDFIIQNLKRNSSYFLGL
SDPGGRRHWQWVDQTPYNENVTFWHSGEPNNLDERCAIINFRSSEEWGWN
DIHCHVPQKSICKMKKIYI.

[0855] A llama was subcutaneously injected on days 0, 7, 14, 21, 28 and 35, each time with about 150 μg of recombinant His6-tagged extracellular domain of human Clec4C (C-type lectin domain family 4, member C) emulsified with Gerbu adjuvant P. On day 40, anticoagulated blood was collected from the llama for lymphocyte preparation.

[0856] A VHH library was constructed from the llama to screen for the presence of antigen-specific VHH. To this end, total RNA from peripheral blood lymphocytes was used as template for first strand cDNA synthesis with an oligo (dT) primer. Using this cDNA, the VHH encoding sequences were amplified by PCR, digested with Pstl and Notl, and cloned into the Pstl and Notl sites of the phagemid vector pMECS. The VHH library thus obtained was called Core S and consists of about 10E08 independent transformants. About 84% of transformants harbored the vector with the right insert size.

[0857] The Core S library was panned on solid-phase coated antigen (120 ug/ml PBS, 12 ug/well) for 3 rounds using the same antigen as for immunization. The enrichment for antigen-specific phages was assessed after each round of panning by comparing the number of phagemid particles eluted from antigen-coated wells with the number of phagemid particles eluted from negative control (uncoated blocked) wells. These experiments suggested that the phage population was enriched for antigen-specific phages about 10-fold, 10-fold and 103-fold after 1st, 2nd and 3rd rounds, respectively.

[0858] The VHH gene cloned in pMECS vector contains PelB signal sequence at the N-terminus and HA tag and His6 tag at the C-terminus (PelB leader-VHH-HA-His6). The PelB leader sequence directs the VHH to the periplasmic space of the E. coli and the HA and His6 tags can be used for the purification and detection of the VHH (e.g., in ELISA, Western Blot, etc.). In the pMECS vector, the His6 tag was followed by an amber stop codon (TAG) and this amber stop codon is followed by gene III of M13 phage. In suppressor E. coli strains (e.g., TG1), the amber stop codon was read as glutamine and therefore the VHH was expressed as fusion protein with protein III of the phage, which allows the display of the VHH on the phage coat for panning. In TG1 suppressor strains, the efficiency of suppression is not 100% and therefore the expression of VHHs in suppressor strains lead to two different types of VHH molecules, i.e., fused to protein III and without protein III). In non-suppressor E. coli strains (e.g., WK6), the amber stop codon was read as stop codon and therefore the resulting VHH was not fused to protein III.

[0859] In total, 190 colonies from rounds 1 and 2 were randomly selected and analyzed by ELISA for the presence of antigen-specific VHH in their periplasmic extracts (ELISA using crude periplasmic extracts from TG1 cultures including soluble VHH). The antigen used for ELISA screening was the same as the one used for immunization, using uncoated blocked wells as negative control. Out of these colonies, 62 scored positive in this assay. Based on sequence data of the positive colonies, 52 different full length VHH were distinguished (SEQ ID Nos: 1400-1451). Table 7 shows the ELISA results of these 52 unique VHHs genes that encode human CLE4C binding agents. The 52 VHH belong to 28 different CDR3 groups of which groups 9-28 consist of a single member (see Table 8).

TABLE 7

| E. coli strain + | | ELISA | ELISA | ELISA ratio |
|---|---|---|---|---|
| Vector | VHH | coated | uncoated | coated/uncoated |
| TG1, pMECS | 1CL21 | 3.7933 | 0.3414 | 11.11 |
| TG1, pMECS | 1CL25 | 4 | 0.6885 | 5.81 |
| TG1, pMECS | 1CL48 | 3.8539 | 0.4925 | 7.83 |
| TG1, pMECS | 1CL72 | 3.7271 | 0.1087 | 34.29 |
| TG1, pMECS | 2CL4 | 2.797 | 0.0893 | 31.32 |
| TG1, pMECS | 2CL8 | 1.8108 | 0.1153 | 15.71 |
| TG1, pMECS | 2CL41 | 4 | 0.1918 | 20.86 |
| TG1, pMECS | 2CL72 | 3.632 | 0.1691 | 21.48 |
| TG1, pMECS | 2CL78 | 3.7525 | 0.1147 | 32.72 |
| TG1, pMECS | 2CL87 | 1.6153 | 0.1402 | 11.52 |
| TG1, pMECS | 2CL88 | 4 | 0.3278 | 12.20 |
| TG1, pMECS | 2CL90 | 4 | 0.5306 | 7.54 |
| TG1, pMECS | 2CL95 | 4 | 0.1721 | 23.24 |
| TG1, pMECS | 1CL54 | 1.8838 | 0.1111 | 16.96 |
| TG1, pMECS | 2CL52 | 1.6522 | 0.2337 | 7.07 |
| TG1, pMECS | 1CL2 | 3.7388 | 0.8585 | 4.36 |
| TG1, pMECS | 1CL32 | 3.2159 | 0.3247 | 9.90 |
| TG1, pMECS | 2CL58 | 2.2413 | 0.4806 | 4.66 |
| TG1, pMECS | 2CL73 | 2.4322 | 0.4931 | 4.93 |
| TG1, pMECS | 2CL43 | 2.6353 | 0.2179 | 12.09 |
| TG1, pMECS | 2CL82 | 2.6766 | 0.2747 | 9.74 |
| TG1, pMECS | 2CL89 | 1.3141 | 0.1233 | 10.66 |
| TG1, pMECS | 2CL25 | 4 | 0.3395 | 11.78 |
| TG1, pMECS | 2CL84 | 3.8636 | 0.2117 | 18.25 |
| TG1, pMECS | 2CL92 | 3.8915 | 0.3423 | 11.37 |
| TG1, pMECS | 2CL21 | 3.8879 | 0.9189 | 4.23 |
| TG1, pMECS | 2CL30 | 3.7936 | 0.4581 | 8.28 |
| TG1, pMECS | 2CL71 | 4 | 0.75 | 5.33 |
| TG1, pMECS | 2CL7 | 0.6645 | 0.1011 | 6.57 |
| TG1, pMECS | 2CL18 | 0.4906 | 0.1036 | 4.74 |
| TG1, pMECS | 2CL26 | 4 | 0.1868 | 21.41 |
| TG1, pMECS | 2CL55 | 1.7011 | 0.1132 | 15.03 |
| TG1, pMECS | 1CL47 | 4 | 0.4084 | 9.79 |
| TG1, pMECS | 2CL59 | 3.7627 | 0.9455 | 3.98 |
| TG1, pMECS | 2CL16 | 2.0274 | 0.1436 | 14.12 |
| TG1, pMECS | 2CL91 | 4 | 0.7192 | 5.56 |
| TG1, pMECS | 2CL15 | 3.8975 | 0.3058 | 12.75 |
| TG1, pMECS | 2CL81 | 3.6877 | 0.4433 | 8.32 |
| TG1, pMECS | 1CL81 | 1.1235 | 0.2381 | 4.72 |
| TG1, pMECS | 1CL56 | 3.8879 | 0.8064 | 4.82 |
| TG1, pMECS | 2CL40 | 3.1091 | 0.2329 | 13.35 |
| TG1, pMECS | 2CL65 | 1.7198 | 0.1844 | 9.33 |
| TG1, pMECS | 2CL57 | 0.9217 | 0.2102 | 4.38 |
| TG1, pMECS | 2CL56 | 0.9988 | 0.2118 | 4.72 |
| TG1, pMECS | 2CL66 | 2.0369 | 0.1098 | 18.55 |
| TG1, pMECS | 2CL34 | 2.7959 | 0.7309 | 3.83 |
| TG1, pMECS | 2CL46 | 3.2996 | 0.6846 | 4.82 |
| TG1, pMECS | 2CL29 | 2.2445 | 0.3281 | 6.84 |
| TG1, pMECS | 1CL88 | 4 | 1.168 | 3.42 |
| TG1, pMECS | 2CL68 | 0.4863 | 0.1004 | 4.84 |
| TG1, pMECS | 1CL82 | 3.0071 | 0.4826 | 6.23 |
| TG1, pMECS | 2CL49 | 2.2761 | 0.3207 | 7.10 |

TABLE 8

| Group | Member(s) |
|---|---|
| 1 | 1CL21, 1CL25, 1CL48, 1CL72, 2CL4, 2CL8, 2CL41, 2CL72, |
| | 2CL78, 2CL87, 2CL88, 2CL90, 2CL95 |
| 2 | 1CL54, 2CL52 |
| 3 | 1CL2, 1CL32, 2CL58, 2CL73 |
| 4 | 2CL43, 2CL82, 2CL89 |
| 5 | 2CL25, 2CL84, 2CL92 |
| 6 | 2CL21, 2CL30, 2CL71 |
| 7 | 2CL7, 2CL18 |
| 8 | 2CL26, 2CL55 |
| 9-28 | 1CL47, 2CL59, 2CL16, 2CL91, 2CL15, 2CL81, 1CL81, |
| | 1CL56, 2CL40, 2CL65, 2CL57, 2CL56, 2CL66, 2CL34, |
| | 2CL46, 2CL29, 1CL88, 2CL68, 1CL82, 2CL49 |

### Sequence Analysis of VHH

[0860] In total, 4 clones have either an internal amber or opal stop codon (1CL72, 2CL68, 2CL49 and 2CL25). For expression in prokaryotic strains (other than suppressor E. coli strains such as TG1) or for expression in eukaryotic cells mutation of the stop codon to a typical VHH consensus sequence at this site can be introduced to ensure processing to full length protein. Such corrected sequences for the VHH 1CL72, 2CL68, 2CL49 and 2CL25 are referred to as SEQ ID NOs: 1452-1455, respectively.

### Characterization of Human Clec4C

[0861] Expression-vectors (pMECS) encoding the 52 human Clec4C binding VHH's were transformed to WK6 cells. VHH's (with a C-terminal His-tag) were expressed in periplasmic extracts upon IPTG overnight stimulation. These extracts were applied in a FACS binding-assay: Hek293T cells were transiently transfected with a full length human Clec4C plasmid (pMET7 FLAG-huClec4C) or an empty vector. Two days after transfections, cells were resuspended and incubated with a 1 over 5 dilution periplasmic extracts in FACS buffer (PBS+0.5 mM EDTA+3% FBS). VHH binding was detected using a FITC-coupled anti-His Ab (Genscript). Samples were acquired with a FACS Calibur (BD Biosciences), with the CellQuest Pro Version 4.0.2 software (BD Biosciences) and analyzed using the FlowJo software (FlowJo).

[0862] Based on two such binding-assays, twelve VHH's (1CL2, 1CL25, 1CL32, 2CL16, 2CL21, 2CL58, 2CL59, 2CL71, 2CL73, 2CL84, 2CL91 and 2CL92) were selected and cloned in the pHEN6C expression vector as follows: pHEN6C-PelB-Clec4C VHH-(His) 6. Proteins were produced overnight in E coli upon IPTG stimulation and purified from periplasmic extracts using the TALON metal affinity resin (Clontech) according to the manufacturer's instructions. Binding of these purified to Clec4C was measured as described above. In brief: Clec4C transfected cells were incubated with a serial dilation (as indicated) VHH and binding was monitored using a FITC coupled anti-His Ab. Data are summarized in FIG. 6 and confirm VHH from sequence groups 3, 5, 6, 10 (2C_{L}59), 11 (2CL16) and 12 (2CL91) to be binding agents for human CLE4C expressed on a cell membrane. Note that VHH 2CL25 (group 5) was not analyzed because of the presence of the opal stop codon in the sequence (see example 2).

### Example 3: Clec4C VHH-Based Fc AFNs

[0863] In this Example, a Clec4C targeted Fc AFN based on a human Clec4C specific VHH (clone 2CL92) for targeting to plasmacytoid dendritic cell was generated and evaluated.

### Constructs:

Clec4C VHH-20*GGS-Fc3 (P-1571)
(SEQ ID NO: 1465)
QVQLQESGGGSVQAGDSLRLSCAASGRTFSGYAMGWFRQAPGKEREFVAT
ISTSGSSTYYADSVKGRFTISRDNAKKSVYLQINSLKTEDAAVYYCAARL
SFDNTAFYTSAIRYSYWGQGTQVTVSSGGSGGSGGSGGSGGSGGSGGSGG
SGGSGGSGGSGGSGGSGGSGGSGGSGGSGGSGGSGGSDKTHTCPPCPAPE
AAGGPSVFLFPPKPKDTLMISRTPEVTCVVVDVSHEDPEVKFNWYVDGVE
VHNAKTKPREEQYNSTYRVVSVLTVLHQDWLNGKEYKCQVSNKALPAPIE
KTISKAKGQPREPQVCTLPPSRDELTKNQVSLSCAVKGFYPSDIAVEWES
NGQPENNYKTTPPVLDSDGSFFLVSKLTVDKSRWQQGNVFSCSVMHEALH
NHYTQKSLSLSPGK
Fc4-20*GGS-IFNa2_R149A (P-1414)
(SEQ ID NO: 1466)
DKTHTCPPCPAPEAAGGPSVFLFPPKPKDTLMISRTPEVTCVVVDVSHED
PEVKFNWYVDGVEVHNAKTKPREEQYNSTYRVVSVLTVLHQDWLNGKEYK
CQVSNKALPAPIEKTISKAKGQPREPQVYTLPPCRDELTKNQVSLWCLVK
GFYPSDIAVEWESNGQPENNYKTTPPVLDSDGSFFLYSKLTVDKSRWQQG
NVFSCSVMHEALHNHYTQKSLSLSPGKGGSGGSGGSGGSGGSGGSGGSGG
SGGSGGSGGSGGSGGSGGSGGSGGSGGSGGSGGSGGSCDLPQTHSLGSRR
TLMLLAQMRKISLFSCLKDRHDFGFPQEEFGNQFQKAETIPVLHEMIQQI
FNLFSTKDSSAAWDETLLDKFYTELYQQLNDLEACVIQGVGVEETPLMKE
DSILAVRKYFQRITLYLKEKKYSPCAWEVVRAEIMASFSLSTNLQESLRS
KE

### Production and Purification of Clec4C VHH-Based AFN

[0864] Constructs Clec4C VHH-20*GGS-Fc3 and Fc4-20*GGS-IFNa2_R149A were combined to a heterodimeric AFN (for a schematic representation, see FIG. 8(A) and transiently expressed in the ExpiCHO expression system (Thermo Fisher) according to the manufacturer's guidelines. One week after transfection, supernatant was collected and cells removed by centrifugation. Recombinant proteins were purified from the supernatant using the Pierce Protein A spin plates (Thermo Fisher).

### Biological Activity on HL116 Reporter Cell-Lines

[0865] The HL116 clone is derived from the human HT1080 cell line (ATCC CCL-121). It contains the firefly luciferase gene controlled by the IFN-inducible 6-16 promoter. Parental HL116 cells were transfected with an expression vector encoding the human Clec4C sequence. Stable transfected clones were selected in G418-containing medium. Parental HL116 and HL116-hClec4C cells were seeded overnight at 20,000 cells per 96-well and subsequently stimulated with a serial dilution of Fc AFNs for 6 hours. Luciferase activity was measured in cell lysates. Data in the FIG. 7 illustrate that both cell-lines are comparably sensitive to wild type IFNa2, while the Clec4C Fc AFN is much more active on targeted cells (HL116-hClec4C) compared to untargeted cells (parental HL116).

### Example 4: Bispecific Clec4C Targeted Fc AFNs

[0866] In this Example, we generated and evaluated Fc AFNs targeting both Clec4C (marker for plasmacytoid dendritic cells) and CD8 (T cell subset). For targeting, we used two VHHs: 2CL92 (human Clec4C specific) and 1CDA65 (human CD8 specific). The bispecific format was compared with the monospecific Fc AFNs for biological activity on target expressing HL116 cells.

Constructs:
Clec4C VHH-20*GGS-Fc3 (P-1571)
(SEQ ID NO: 1467)
QVQLQESGGGSVQAGDSLRLSCAASGRTFSGYAMGWFRQAPGKEREFVAT
ISTSGSSTYYADSVKGRFTISRDNAKKSVYLQINSLKTEDAAVYYCAARL
SFDNTAFYTSAIRYSYWGQGTQVTVSSGGSGGSGGSGGSGGSGGSGGSGG
SGGSGGSGGSGGSGGSGGSGGSGGSGGSGGSGGSGGSDKTHTCPPCPAPE
AAGGPSVFLFPPKPKDTLMISRTPEVTCWVVDVSHEDPEVKFNWYVDGVE
VHNAKTKPREEQYNSTYRVVSVLTVLHQDWLNGKEYKCQVSNKALPAPIE
KTISKAKGQPREPQVCTLPPSRDELTKNQVSLSCAVKGFYPSDIAVEWES
NGQPENNYKTTPPVLDSDGSFFLVSKLTVDKSRWQQGNVFSCS
VMHEALHNHYTQKSLSLSPGK
CD8 VHH-20*GGS-Fc3 (P-1568)
(SEQ ID NO: 1468)
QVQLQESGGGLVHPGGSLRLSCAASGRSFSSYFMGWFRQAPGKEREFVAG
IGWNDGSINYADSVKGRFTISRDNAKNTGYLQMNSLKPEDTAVYYCAASV
SLYGLEKSSAYTSWGQGTQVTVSSGGSGGSGGSGGSGGSGGSGGSGGSGG
SGGSGGSGGSGGSGGSGGSGGSGGSGGSGGSGGSDKTHTCPPCPAPEAAG
GPSVFLFPPKPKDTLMISRTPEVTCVVVDVSHEDPEVKFNWYVDGVEVHN
AKTKPREEQYNSTYRVVSVLTVLHQDWLNGKEYKCQVSNKALPAPIEKTI
SKAKGQPREPQVCTLPPSRDELTKNQVSLSCAVKGFYPSDIAVEWESNGQ
PENNYKTTPPVLDSDGSFFLVSKLTVDKSRWQQGNVFSCSVM
HEALHNHYTQKSLSLSPGK
Fc4-20*GGS-IFNa2_R149A (P-1414)
(SEQ ID NO: 1469)
DKTHTCPPCPAPEAAGGPSVFLFPPKPKDTLMISRTPEVTCVWVDVSHED
PEVKFNWYVDGVEVHNAKTKPREEQYNSTYRVVSVLTVLHQDWLNGKEYK
CQVSNKALPAPIEKTISKAKGQPREPQVYTLPPCRDELTKNQVSLWCLVK
GFYPSDIAVEWESNGQPENNYKTTPPVLDSDGSFFLYSKLTVDKSRWQQG
NVFSCSVMHEALHNHYTQKSLSLSPGKGGSGGSGGSGGSGGSGGSGGSGG
SGGSGGSGGSGGSGGSGGSGGSGGSGGSGGSGGSGGSCDLPQTHSLGSRR
TLMLLAQMRKISLFSCLKDRHDFGFPQEEFGNQFQKAETIPVLHEMIQQI
FNLFSTKDSSAAWDETLLDKFYTELYQQLNDLEACVIQGVGVEETPLMKE
DSILAVRKYFQRITLYLKEKKYSPCAWEVVRAEIMASFSLSTNLQESLRS
KE
CD8 VHH-20*GGS-Fc4-20*GGS-IFNa2_R149A (P-1628)
(SEQ ID NO: 1470)
QVQLQESGGGLVQPGGSLRLSCAASGSIFSINVMGWYRQTPGKERELVAK
ITNFGITSYADSAQGRFTISRGNAKNTVYLQMNSLKPEDTAVYYCNLDTT
GWGPPPYQYWGQGTQVTVSSGGSGGSGGSGGSGGSGGSGGSGGSGGSGGS
GGSGGSGGSGGSGGSGGSGGSGGSGGSGGSDKTHTCPPCPAPEAAGGPSV
FLFPPKPKDTLMISRTPEVTCVVVDVSHEDPEVKFNWYVDGVEVHNAKTK
PREEQYNSTYRVVSVLTVLHQDWLNGKEYKCQVSNKALPAPIEKTISKAK
GQPREPQVYTLPPCRDELTKNQVSLWCLVKGFYPSDIAVEWESNGQPENN
YKTTPPVLDSDGSFFLYSKLTVDKSRWQQGNVFSCSVMHEALHNHYTQKS
LSLSPGKGGSGGSGGSGGSGGSGGSGGSGGSGGSGGSGGSGGSGGSGGSG
GSGGSGGSGGSGGSGGSCDLPQTHSLGSRRTLMLLAQMRKISLFSCLKDR
HDFGFPQEEFGNQFQKAETIPVLHEMIQQIFNLFSTKDSSAAWDETLLDK
FYTELYQQLNDLEACVIQGVGVEETPLMKEDSILAVRKYFQRITLYLKEK
KYSPCAWEWVRAEIMASFSLSTNLQESLRSKE

### Production and Purification of Clec4C and CD8 VHH-Based AFNs

[0867] The following combinations were transiently transfected in ExpiCHO cells:

$$Clec 4 C VHH - Fc 3 + Fc 4 - IFNa 2 \_R 149 A ( Clec 4 C specific AFN ; scheme : FIG \text{.8} ( A ) ) ) ) ; \qquad ( i )$$

$$CD 8 VHH - Fc 3 + Fc 4 - IFNa 2 \_R 149 A ( Cle 4 C specific AFN ; scheme : FIG \text{.8} ( B ) ) ; \qquad ( ii )$$

$$Clec 4 C VHH - Fc 3 + CD 8 VHH - Fc 4 - IFNa 2 \_R 149 A ( bi - specific AFN ; scheme : FIG \text{.8} ( C ) ) . \qquad ( iii )$$

[0868] One week after transfection, supernatant was collected and cells removed by centrifugation. Recombinant proteins were purified from the supernatant using the Pierce Protein A spin plates (Thermo Fisher).

### Biological Activity on HL116 Reporter Cell-Lines

[0869] The HL116 clone is derived from the human HT1080 cell line (ATCC CCL-121). It contains the firefly luciferase gene controlled by the IFN-inducible 6-16 promoter. Vectors encoding human Clec4C or human CD8 were stably transfected in these HL116 cells, resulting in the HL116-hClec4C and HL116-hCD8 cell lines. To measure biological activity, parental and derived cells were seeded overnight at 20,000 cells per 96-well and subsequently stimulated with a serial dilution of Fc AFNs for 6 hours. Luciferase activity was measured in cell lysates. Data in FIG. 8 illustrate that mono-specific Fc AFNs are only active on the respective HL116-hClec4C and HL116-hCD8 cell lines, while the bi-specific Fc AFN induces signaling in both cell lines, but not in parental cells.

### Example 5: Specific Stimulation of Human Clec4C Positive Cells by Targeted Cytokines

[0870] In this Example, we compared signaling upon targeting of wild type IFNa2 or the AFN mutant IFNa2_R149A to a specific dendritic subset population within peripheral blood mononuclear cells (PBMCs). The cytokine, or mutant thereof, was targeted using a Clec4C VHH (clone 2CL92) in an Fc context.

### Constructs:

Clec4C VHH-20*GGS-Fc3 (P-1571)
(SEQ ID NO: 1471)
QVQLQESGGGSVQAGDSLRLSCAASGRTFSGYAMGWFRQAPGKEREFVAT
ISTSGSSTYYADSVKGRFTISRDNAKKSVYLQINSLKTEDAAVYYCAARL
SFDNTAFYTSAIRYSYWGQGTQVTVSSGGSGGSGGSGGSGGSGGSGGSGG
SGGSGGSGGSGGSGGSGGSGGSGGSGGSGGSGGSGGSDKTHTCPPCPAPE
AAGGPSVFLFPPKPKDTLMISRTPEVTCVVVDVSHEDPEVKFNWYVDGVE
VHNAKTKPREEQYNSTYRVVSVLTVLHQDWLNGKEYKCQVSNKALPAPIE
KTISKAKGQPREPQVCTLPPSRDELTKNQVSLSCAVKGFYPSDIAVEWES
NGQPENNYKTTPPVLDSDGSFFLVSKLTVDKSRWQQGNVFSCSVMHEALH
NHYTQKSLSLSPGK
Fc4-20*GGS-IFNa2_R149A (P-1414)
(SEQ ID NO: 1472)
DKTHTCPPCPAPEAAGGPSVFLFPPKPKDTLMISRTPEVTCVVVDVSHED
PEVKFNWYVDGVEVHNAKTKPREEQYNSTYRVVSVLTVLHQDWLNGKEYK
CQVSNKALPAPIEKTISKAKGQPREPQVYTLPPCRDELTKNQVSLWCLVK
GFYPSDIAVEWESNGQPENNYKTTPPVLDSDGSFFLYSKLTVDKSRWQQG
NVFSCSVMHEALHNHYTQKSLSLSPGKGGSGGSGGSGGSGGSGGSGGSGG
SGGSGGSGGSGGSGGSGGSGGSGGSGGSGGSGGSGGSCDLPQTHSLGSRR
TLMLLAQMRKISLFSCLKDRHDFGFPQEEFGNQFQKAETIPVLHEMIQQI
FNLFSTKDSSAAWDETLLDKFYTELYQQLNDLEACVIQGVGVEETPLMKE
DSILAVRKYFQRITLYLKEKKYSPCAWEVVRAEIMASFSLSTNLQESLRS
KE
Fc4-20*GGS-IFNa2 (P-1538)
(SEQ ID NO: 1473)
DKTHTCPPCPAPEAAGGPSVFLFPPKPKDTLMISRTPEVTCVVVDVSHED
PEVKFNWYVDGVEVHNAKTKPREEQYNSTYRVVSVLTVLHQDWLNGKEYK
CQVSNKALPAPIEKTISKAKGQPREPQVYTLPPCRDELTKNQVSLWCLVK
GFYPSDIAVEWESNGQPENNYKTTPPVLDSDGSFFLYSKLTVDKSRWQQG
NVFSCSVMHEALHNHYTQKSLSLSPGKGGSGGSGGSGGSGGSGGSGGSGG
SGGSGGSGGSGGSGGSGGSGGSGGSGGSGGSGGSGGSCDLPQTHSLGSRR
TLMLLAQMRKISLFSCLKDRHDFGFPQEEFGNQFQKAETIPVLHEMIQQI
FNLFSTKDSSAAWDETLLDKFYTELYQQLNDLEACVIQGVGVEETPLMKE
DSILAVRKYFQRITLYLKEKKYSPCAWEVVRAEIMRSFSLSTNLQESLRS
KE

### Production and Purification of Clec4C VHH-Based IFN or AFN

[0871] Combinations of these constructs were transiently transfected in ExpiCHO cells and resulted in following AFNs (for a schematic outline of the construct, see FIG. 8(A):

$$Clec 4 C VHH - 2 {0}^{*} GGS - Fc 3 + Fc 4 - IFNa 2 \_R 149 A \qquad ( i )$$

$$Clec 4 C VHH - 20 * GGS - Fc 3 + Fc 4 - IFNa 2 \qquad ( ii )$$

[0872] One week after transfection, supernatant was collected, and cells removed by centrifugation. Recombinant proteins were purified from the supernatant using the Pierce Protein A spin plates (Thermo Fisher).

### Biological Activity Upon Clec4C Targeting: STAT1 Phosphorylation in PBMCs

[0873] Biological activity of the Clec4C-targeted AFN was tested as follows: PBMCs from buffy coats of healthy donors were isolated using density gradient centrifugation with Ficoll-Paque (GE Healthcare). Dendritic cells were first enriched using the pan-DC enrichment kit (Miltenyi Biotec). Enriched cells were washed twice with FACS buffer (2% FBS, 1 mM EDTA in PBS) and stained with FITC-coupled anti-hClec4C (Miltenyi Biotec) for 20 minutes at 4° C. After two washes, cells were stimulated with a serial dilution of wild type or mutants Fc AFNs for 15 minutes at 37° C. After fixation (10 minutes, 37° C., Fix Buffer I; BD Biosciences) and permeabilization (30 minutes, on ice, Perm III Buffer I; BD Biosciences) and washing, cells were stained with anti-STAT1 pY701 Ab (BD Biosciences). Samples were acquired with a Macsquant X instrument (Miltenyi Biotec) and analysed using the FlowLogic software (Miltenyi Biotec). Data are summarized in FIG. 9. Clec4C positive and negative cells respond with similar potency (ratio of EC50s: ˜ 1) to wild type IFNa2. On the other hand, wild type or mutant IFNa2 is much more active when targeted with a Clec4C VHH to Clec4C positive cells. The respective EC50 ratios are about 40 and >40.

### EQUIVALENTS

[0874] While the invention has been described in connection with specific embodiments thereof, it will be understood that it is capable of further modifications and this application is intended to cover any variations, uses, or adaptations of the invention following, in general, the principles of the invention and including such departures from the present disclosure as come within known or customary practice within the art to which the invention pertains and as may be applied to the essential features hereinbefore set forth and as follows in the scope of the appended claims. Those skilled in the art will recognize, or be able to ascertain, using no more than routine experimentation, numerous equivalents to the specific embodiments described specifically herein. Such equivalents are intended to be encompassed in the scope of the following claims.

### INCORPORATION BY REFERENCE

[0875] All patents and publications referenced herein are hereby incorporated by reference in their entireties.

[0876] The publications discussed herein are provided solely for their disclosure prior to the filing date of the present application. Nothing herein is to be construed as an admission that the present invention is not entitled to antedate such publication by virtue of prior invention.

[0877] As used herein, all headings are simply for organization and are not intended to limit the disclosure in any manner. The content of any individual section may be equally applicable to all sections.

TABLE 9
Illustrative Clec4C Binding Agent Sequences

| | Protein | CDR1 | CDR1 | CDR2 | CDR2 | |
|---|---|---|---|---|---|---|
| Clone | Sequence | AbM | Kabat | AbM | Kabat | CDR3 |
| 1CL21 | QVQLQESGGGLVRPGGSLRLSCVGSG | GSTFRHH | HHAMA | AINDHGT | AINDHGT | GPLVDYL |
| | STFRHHAMAWFRQTTGKEREFVSAIND | AMA (SEQ | (SEQ ID | KTR (SEQ | KTRYSDS | ETVPVVY |
| | HGTKTRYSDSVRGRFTISRDNDENMVY | ID NO: | NO: 1264) | ID NO: | VRG (SEQ | TY (SEQ |
| | LQMDNLRPEDTAVYSCAAGPLVDYLET | 1227) | | 1289) | ID NO: | ID NO: |
| | VPVVYTYWGQGTQVTVSS (SEQ ID | | | | 1326) | 1366) |
| | NO: 1400) | | | | | |
| 1CL25 | QVQLQESGGGLVQPGGSLRLSCAASG | GSTFRHH | HHAMA | AINDHGD | AINDHGD | GPLVDYL |
| | STFRHHAMAWFRQTPGKEREFVSAIND | AMA (SEQ | (SEQ ID | RTK (SEQ | RTKYLDS | ETTPLVY |
| | HGDRTKYLDSVRGRFTISRDNTDNMVY | ID NO: | NO: 1264) | ID NO: | VRG (SEQ | TY (SEQ |
| | LLMSDLRPEDTAVYSCAAGPLVDYLET | 1227) | | 1290) | ID NO: | ID NO: |
| | TPLVYTYWGQGTQVTVSS (SEQ ID | | | | 1327) | 1367) |
| | NO: 1401) | | | | | |
| 1CL48 | QVQLQESGGGLVQPGGSLRLSCVGSG | GSTFRHH | HHAMA | AINNHGT | AINNHGT | GPLVDYL |
| | STFRHHAMAWFRQTAGKEREFVSAINN | AMA (SEQ | (SEQ ID | KTR (SEQ | KTRYSDS | ETVPVVY |
| | HGTKTRYSDSVRGRFTISRDNDENMVY | ID NO: | NO: 1264) | ID NO: | VRG (SEQ | TY (SEQ |
| | LQMDNLRPEDTAVYSCAAGPLVDYLET | 1227) | | 1291) | ID NO: | ID NO: |
| | VPVVYTYWGQGTQVTVSS (SEQ ID | | | | 1328) | 1366) |
| | NO: 1402) | | | | | |
| 1CL72 | QVQLQESGGGLVQPGESLKLSCAGSG | GSTFRHH | HHAMA | AINDHGD | AINDHGD | GPLVDYL |
| | STFRHHAMAWFRQXPGKEREFVSAIN | AMA (SEQ | (SEQ ID | RTK | RTKYLDS | ETTPLVY |
| | DHGDRTKYLDSVRGRFTISRDNTNNMV | ID NO: | NO: 1264) | AINDHGD | VRG (SEQ | TY (SEQ |
| | YLQMSDLRPEDTANYSCAAGPLVDYLE | 1227) | | RTK (SEQ | ID NO: | ID NO: |
| | TTPLVYTYWGQGTQVTVSS (SEQ ID | | | ID NO: | 1327) | 1367) |
| | NO: 1403) | | | 1290) | | |
| 2CL4 | QVQLQESGGGLVQPGGSLRISCAGSG | GSTFRHH | HHAMA | AINDHGT | AINDHGT | GPLVDYL |
| | STFRHHAMAWFRQTAGKEREFVSAIND | AMA (SEQ | (SEQ ID | KTR (SEQ | KTRYSDS | ETVPVVY |
| | HGTKTRYSDSVRGRFTISRDNDENMVY | ID NO: | NO: 1264) | ID NO: | VRG (SEQ | TY (SEQ |
| | LQMDNLRSEDTANYTCAAGPLVDYLET | 1227) | | 1289) | ID NO: | ID NO: |
| | VPVVYTYWGQGTQVTVSS (SEQ ID | | | | 1326) | 1366) |
| | NO: 1404) | | | | | |
| 2CL8 | QVQLQESGGGLVQPGGSLKLSCAGSG | GSTFRHH | HHALA | AINDHGT | AINDHGT | GPLVDYL |
| | STFRHHALAWFRQTAEKEREFVSAIND | ALA (SEQ | (SEQ ID | KTR (SEQ | KTRYSDS | ETVPVVY |
| | HGTKTRYSDSVRGRFTISRDNDGNMV | ID NO: | NO: 1265) | ID NO: | VRG (SEQ | TY (SEQ |
| | YLQMDNLRPEDTAVYSCAAGPLVDYLE | 1228) | | 1289) | ID NO: | ID NO: |
| | TVPVVYTYWGQGTQVTVSS (SEQ ID | | | | 1326) | 1366) |
| | NO: 1405) | | | | | |
| 2CL41 | QVQLQESGGGLVQAGGSLRLSCAASG | GSTFRHH | HHAMA | AINDHGD | AINDHGD | GPLVDYL |
| | STFRHHAMAWFRQTPGKEREFVSAIND | AMA (SEQ | (SEQ ID | RTK (SEQ | RTKYLDS | ETTPLVY |
| | HGDRTKYLDSVRGRFTISRDNTDNMVY | ID NO: | NO: 1264) | ID NO: | VRG (SEQ | TY (SEQ |
| | LQMSDLRTEDTAVYTCAAGPLVDYLET | 1227) | | 1290) | ID NO: | ID NO: |
| | TPLVYTYWGQGTQVTVSS (SEQ ID | | | | 1327) | 1367) |
| | NO: 1406) | | | | | |
| 2CL72 | QVQLQESGGGLVQPGGSLKLSCAASG | GSTFRHH | HHAMA | AINDHGD | AINDHGD | GPLVDYL |
| | STFRHHAMAWFRQTPGKEREFVSAIND | AMA (SEQ | (SEQ ID | RTK (SEQ | RTKYLDS | ETTPLVY |
| | HGDRTKYLDSVRGRFTISRDNTDNMVY | ID NO: | NO: 1264) | ID NO: | VRG (SEQ | TY (SEQ |
| | LQMSDLRPEDTAVYSCAAGPLVDYLET | 1227 | | 1290) | ID NO: | ID NO: |
| | TPLVYTYWGQGTQVTVSS (SEQ ID | | | | 1327 | 1367) |
| | NO: 1407) | | | | | |
| 2CL78 | QVQLQESGGGVVQPGGSLKLSCAASG | GSTFRHH | HHAMA | AINDHGD | AINDHGD | GPLVDYL |
| | STFRHHAMAWFRQTPGKEREFVSAIND | AMA (SEQ | (SEQ ID | RTK (SEQ | RTKYLDS | ETTPLVY |
| | HGDRTKYLDSVRGRFTISRDDTDNMVY | ID NO: | NO: 1264) | ID NO: | VRG (SEQ | TY (SEQ |
| | LQMSDLRTEDTAVYTCAAGPLVDYLET | 1227) | | 1290) | ID NO: | ID NO: |
| | TPLVYTYWGQGTQVTVSS (SEQ ID | | | | 1327) | 1367) |
| | NO: 1408) | | | | | |
| 2CL87 | QVQLQESGGGLVQPGGSLRLSCAGSG | GSTFRHH | HHAMA | AINDHGD | AINDHGD | GPLVDYL |
| | STFRHHAMAWFRQTPGKEREFVSAIND | AMA (SEQ | (SEQ ID | RTK (SEQ | RTKYTDS | ETTPLVY |
| | HGDRTKYTDSVRGRFTISRDNTDNMVY | ID NO: | NO: 1264) | ID NO: | VRG (SEQ | TY (SEQ |
| | LQMSDLRPEDTAVYSCAAGPLVDYLET | 1227) | | 1290) | ID NO: | ID NO: |
| | TPLVYTYWGQGTQVTVSS (SEQ ID | | | | 1329) | 1367) |
| | NO: 1409) | | | | | |
| 2CL88 | QVQLQESGGGLVQPGGSLKLSCTGSG | GSTFRHH | HHAMA | AINDHGD | AINDHGD | GPLVDYL |
| | STFRHHAMAWFRQTPGKEREFVAAIND | AMA (SEQ | (SEQ ID | RTK (SEQ | RTKYLDS | ETTPLVY |
| | HGDRTKYLDSVRGRFTISRDNTDNMVY | ID NO: | NO: 1264) | ID NO: | VRG (SEQ | TY (SEQ |
| | LQMSDLRPEDTANYSCAAGPLVDYLET | 1227) | | 1290) | ID NO: | ID NO: |
| | TPLVYTYWGQGTQVTVSS (SEQ ID | | | | 1327) | 1367) |
| | NO: 1410) | | | | | |
| 2CL90 | QVQLQESGGGLVQAGGSLRLSCAASG | GSTFRHH | HHAMA | AINDHGD | AINDHGD | GPLVDYL |
| | STFRHHAMAWFRQTPGKGREFVSAIN | AMA (SEQ | (SEQ ID | RTK (SEQ | RTKYLDS | ETTPLVY |
| | DHGDRTKYLDSVRGRFTISRDNTDNMV | ID NO: | NO: 1264) | ID NO: | VRG (SEQ | TY (SEQ |
| | YLQMSDLRPEDTAVYSCAAGPLVDYLE | 1227) | | 1290) | ID NO: | ID NO: |
| | TTPLVYTYWGQGTQVTVSS (SEQ ID | | | | 1327) | 1367) |
| | NO: 1411) | | | | | |
| 2CL95 | QVQLQESGGGLVQPGGSLKLSCAGSG | GSTFKHH | HHAMA | AINDHGD | AINDHGD | GPLVDYL |
| | STFKHHAMAWFRHTPGKEREFVSAIND | AMA (SEQ | (SEQ ID | RTK (SEQ | RTKYSDS | ETTPLVY |
| | HGDRTKYSDSVRGRFTIARDNTDNMVY | ID NO: | NO: 1264) | ID NO: | VRG (SEQ | TY (SEQ |
| | LQMDDLLPEDTANYTCAAGPLVDYLET | 1229) | | 1290) | ID NO: | ID NO: |
| | TPLVYTYWGQGTQVTVSS (SEQ ID | | | | 1330) | 1367) |
| | NO: 1412) | | | | | |
| 1CL54 | QVQLQESGGGLAQAGASLRLSCAGSG | GNNFEH | HYAVA | AIRDYGD | AIRDYGD | GPLNDYL |
| | NNFEHYAVAWFRQDAPGKERDFVAAIR | YAVA | (SEQ ID | RTR (SEQ | RTRYDDS | EVTPLVY |
| | DYGDRTRYDDSVKGRFTISRDNAKSMV | (SEQ ID | NO: 1266) | ID NO: | VKG (SEQ | TY (SEQ |
| | YLEMNNLKPKDAAVYYCAAGPLNDYLE | NO: 1230) | | 1292) | ID NO: | ID NO: |
| | VTPLVYTYWGQGTQVTVSS (SEQ ID | | | | 1331) | 1368) |
| | NO: 1413) | | | | | |
| 2CL52 | QVQLQESGGGLAQAGASLRLSCAGSG | GNNFEH | HYAVA | AIRDYGD | AIRDYGD | GPLNDYL |
| | NNFEHYAVAWFRQEAPGKERDFVAAIR | YAVA | (SEQ ID | RTR (SEQ | RTRYADS | EVTPLVY |
| | DYGDRTRYADSVKGRFTISRDNAKSMV | (SEQ ID | NO: 1266) | ID NO: | VKG (SEQ | TY (SEQ |
| | YLEMNNLKPEDTAVYYCTAGPLNDYLE | NO: 1230) | | 1292) | ID NO: | ID NO: |
| | VTPLVYTYWGQGTQVTVSS (SEQ ID | | | | 1332) | 1368) |
| | NO: 1414) | | | | | |
| 1CL2 | QVQLQESGGGLVQAGDSLRLSCAASG | GDTFSM | MYAMG | AISRSGG | AISRSGG | RLTFSTT |
| | DTFSMYAMGWFRQAPGKEREFVAAIS | YAMG | (SEQ ID | STD (SEQ | STDYRDS | TAYTGEL |
| | RSGGSTDYRDSVKGRFTISRDNDLNAG | (SEQ ID | NO: 1267) | ID NO: | VKG (SEQ | QYPY |
| | YLQMNSLKPEDTAVYYCALRLTFSTTTA | NO: 1231) | | 1293) | ID NO: | (SEQ ID |
| | YTGELQYPYWGQGTQVTVSS (SEQ ID | | | | 1333) | NO: 1369) |
| | NO: 1415) | | | | | |
| 1CL32 | QVQLQESGGGLVQAGDSLRLSCAASG | GDTFSM | MYTMG | AISRSGG | AISRSGG | RLTFSTT |
| | DTFSMYTMGWFRQAPGKEREFVAAIS | YTMG | (SEQ ID | STN (SEQ | STNYRDS | TAYTGEL |
| | RSGGSTNYRDSVKGRFTISRDNDLNAG | (SEQ ID | NO: 1268) | ID NO: | VKG (SEQ | QYPY |
| | YLQMNSLKPEDTAVYYCALRLTFSTTTA | NO: 1232) | | 1294) | ID NO: | (SEQ ID |
| | YTGELQYPYWGQGTQVTVSS (SEQ ID | | | | 1334) | NO: 1369) |
| | NO: 1416) | | | | | |
| 2CL58 | QVQLQESGGGLVQAGDSLRLSCAASG | GDTFSM | MYAMG | AISRSGS | AISRSGS | RLTFSTT |
| | DTFSMYAMGWFRQAPGKEREFVAAIS | YAMG | (SEQ ID | STN (SEQ | STNYRDS | TTYTGEL |
| | RSGSSTNYRDSVKGRFTISRDNDLNAG | (SEQ ID | NO: 1267) | ID NO: | VKG (SEQ | QYPY |
| | YLQMNSLKPEDTAVYYCALRLTFSTTTT | NO: 1231) | | 1295) | ID NO: | (SEQ ID |
| | YTGELQYPYWGQGTQVTVSS (SEQ ID | | | | 1335) | NO: 1370) |
| | NO: 1417) | | | | | |
| 2CL73 | QVQLQESGGGLVQAGDSLRLSCAASG | GNTFSM | MYAMG | AISRSGG | AISRSGG | RLTFSTT |
| | NTFSMYAMGWFRQAPGKEREFVAAIS | YAMG | (SEQ ID | STN (SEQ | STNYRDS | DAYTGKL |
| | RSGGSTNYRDSVKGRFTISRDNDLNAG | (SEQ ID | NO: 1267) | ID NO: | VKG (SEQ | QYPY |
| | YLQMNNLKPEDTAVYYCALRLTFSTTD | NO: 1233) | | 1294) | ID NO: | (SEQ ID |
| | AYTGKLQYPYWGQGTQVTVSS (SEQ | | | | 1334) | NO: 1371) |
| | ID NO: 1418) | | | | | |
| 2CL43 | QVQLQESGGGTVQPGESLRLSCEVST | TDTFSSL | SLAMA | AISWSGA | AISWSGA | DLDGRT |
| | DTFSSLAMAWFRQATGKDREFVAAISW | AMA (SEQ | (SEQ ID | STV (SEQ | STVYGDS | WHGDDL |
| | SGASTVYGDSVKGRFTMTRDHPKKMV | ID NO: | NO: 1269) | ID NO | VKG (SEQ | EYDY |
| | YLQMDNLKPEDTAVYYCAGDLDGRTW | 1234) | | 1296) | ID NO: | (SEQ ID |
| | HGDDLEYDYWGQGTQVTVSS (SEQ ID | | | | 1336) | NO: 1372) |
| | NO: 1419) | | | | | |
| 2CL82 | QVQLQESGGGLVQPGGSLRLSCEVST | TDTFSSL | SLAMA | AISWSGA | AISWSGA | DLDGRT |
| | DTFSSLAMAWFRQATGKEREFVAAISW | AMA (SEQ | (SEQ ID | STV (SEQ | STVYGDS | WHGDDL |
| | SGASTVYGDSVKGRFTMTRDHPKKMV | ID NO: | NO: 1269) | ID NO | VKG (SEQ | EYDY |
| | YLQMDNLKPEDTAVYYCAGDLDGRTW | 1234) | | 1296) | ID NO: | (SEQ ID |
| | HGDDLEYDYWGQGTQVTVSS (SEQ ID | | | | 1336) | NO: 1372) |
| | NO: 1420) | | | | | |
| 2CL89 | QVQLQESGGGTVQPGESLRLSCEVST | TDTFSSL | SLAMA | AISWSGD | AISWSGD | DLDGRT |
| | DTFSSLAMAWFRQATAKDREFVAAISW | AMA (SEQ | (SEQ ID | STV (SEQ | STVYGDS | WHGDDL |
| | SGDSTVYGDSVKGRFTMTRDHPKKMV | ID NO: | NO: 1269) | ID NO | VKG (SEQ | EYDY |
| | YLQMDNLKPEDTAVYYCAGDLDGRTW | 1234) | | 1297) | ID NO: | (SEQ ID |
| | HGDDLEYDYWGQGTQVTVSS (SEQ ID | | | | 1337) | NO: 1372) |
| | NO: 1421) | | | | | |
| 2CL25 | QVQLQESGGGSVQAGGSLRLSCAASG | GRTFSNY | NYAMG | TISVSGS | TISVSGS | RLSFDNT |
| | RTFSNYAMGXFRQTPGKEREFVATISV | AMG | (SEQ ID | STD (SEQ | STDYADS | ALYTSAN |
| | SGSSTDYADSVKGRFTISRDNAKKTVY | (SEQ ID | NO: 1270) | ID NO: | VKG (SEQ | RYSY |
| | LQINSLKTEDTAVYYCAARLSFDNTALY | NO: 1235) | | 1298) | ID NO: | (SEQ ID |
| | TSANRYSYWGQGTQVTVSS (SEQ ID | | | | 1338) | NO: 1373) |
| | NO: 1422) | | | | | |
| 2CL84 | QVQLQESGGGSVQAGGSLRLSCAASG | GRTFSDY | DYAMG | TISKSGS | TISKSGS | RLSFDNT |
| | RTFSDYAMGWFRQAPGKEREFVATISK | AMG | (SEQ ID | STD (SEQ | STDYADS | AFYTSAI |
| | SGSSTDYADSAKGRFTISRDNAKKTVY | (SEQ ID | NO: 1271) | ID NO | AKG (SEQ | RYSD |
| | LQINSLKTEDTAVYYCAARLSFDNTAFY | NO: 1236) | | 1299) | ID NO: | (SEQ ID |
| | TSAIRYSDWGQGTQVTVSS (SEQ ID | | | | 1339) | NO: 1374) |
| | NO: 1423) | | | | | |
| 2CL92 | QVQLQESGGGSVQAGDSLRLSCAASG | GRTFSGY | GYAMG | TISTSGS | TISTSGS | RLSFDNT |
| | RTFSGYAMGWFRQAPGKEREFVATIST | AMG | (SEQ ID | STY (SEQ | STYYADS | AFYTSAI |
| | SGSSTYYADSVKGRFTISRDNAKKSVY | (SEQ ID | NO: 1272) | ID NO: | VKG (SEQ | RYSY |
| | LQINSLKTEDAAVYYCAARLSFDNTAFY | NO: 1237) | | 1300) | ID NO: | (SEQ ID |
| | TSAIRYSYWGQGTQVTVSS (SEQ ID | | | | 1340) | NO: 1375) |
| | NO: 1424) | | | | | |
| 2CL21 | QVQLQESGGGLVQAGGSLRLSCAASG | GRTFTGY | GYAMG | RISRSGN | RISRSGN | TTSWLPG |
| | RTFTGYAMGWFRQVPGLEREFVARISR | AMG | (SEQ ID | STG (SEQ | STGYADS | HNANVY |
| | SGNSTGYADSVKGRFTVSRDNAKSTM | (SEQ ID | NO: 1272) | ID NO: | VKG (SEQ | DY (SEQ |
| | YLQMNSLKTEDTAVYYCAATTSWLPGH | NO: 1238) | | 1301) | ID NO: | ID NO: |
| | NANVYDYWGQGTQVTVSS (SEQ ID | | | | 1341) | 1376) |
| | NO: 1425) | | | | | |
| 2CL30 | QVQLQESGGGSVQAGGSLRLSCAASG | GRTFSDY | DYAMG | RISRSGD | RISRSGD | TTSWLPG |
| | RTFSDYAMGWFRQVPGLEREFVARISR | AMG | (SEQ ID | STG (SEQ | STGYADS | HNANVY |
| | SGDSTGYADSVKGRFTVSRDNAKNTV | (SEQ ID | NO: 1271) | ID NO: | VKG (SEQ | DY (SEQ |
| | YLQMNSLKTEDTAVYYCAATTSWLPGH | NO: 1236) | | 1302) | ID NO: | ID NO: |
| | NANVYDYWGQGTQVTVSS (SEQ ID | | | | 1342) | 1376) |
| | NO: 1426) | | | | | |
| 2CL71 | QVQLQESGGGLVQAGGSLRLSCAASG | GLTFGRY | RYAMG | RISRSGD | RISRSGD | GTSWVP |
| | LTFGRYAMGWFRQVPGLEREFIARISR | AMG | (SEQ ID | NTG (SEQ | NTGYADS | GHNANA |
| | SGDNTGYADSVKGRFTVSRDSAKSTV | (SEQ ID | NO: 1273) | ID NO: | VKG (SEQ | YDY (SEQ |
| | YLQMNSLKTEDTAVYYCAAGTSWVPG | NO: 1239) | | 1303) | ID NO: | ID NO: |
| | HNANAYDYWGQGTQVTVSS (SEQ ID | | | | 1343) | 1377) |
| | NO: 1427) | | | | | |
| 2CL7 | QVQLQESGGGLVQAGDSLRLSCAPSG | GLTFGRY | RYAMG | CINKSDG | CINKSDG | AWECDY |
| | FTFDGYAIGWFRQAPGKEREKVACINK | AMG | (SEQ ID | LTY (SEQ | LTYYEDS | APADFGS |
| | SDGLTYYEDSVKGRFTISSDTAKNTIHL | (SEQ ID | NO: 1273) | ID NO: | VKG (SEQ | (SEQ ID |
| | QMNSLKPDDTAVYYCAAAWECDYAPA | NO: 1239) | | 1304) | ID NO: | NO: 1378) |
| | DFGSWGQGTQVTVSS (SEQ ID | | | | 1344) | |
| | NO: 1428) | | | | | |
| 2CL18 | QVQLQESGGGLVQAGGSLRLSCAPSG | GFTFDGY | GYAIG | CINKSDG | CINKSDG | AWECDY |
| | FTFDGYAIGWFRQAPGKEREKVACINK | AIG (SEQ | (SEQ ID | LTY (SEQ | LTYYEDS | APADFGS |
| | SDGLTYYEDSVKGRFTISSDTAKNTIHL | ID NO: | NO: 1274) | ID NO: | VKG (SEQ | (SEQ ID |
| | QMNSLKPDDTAVYYCAAAWECDYAPA | 1240) | | 1304) | ID NO: | NO: 1378) |
| | DFGSWGQGTQVTVSS (SEQ ID NO: | | | | 1344) | |
| | 1429) | | | | | |
| 2CL26 | QVQLQESGGGWVQPGDSLRLSCAAS | GFTFSDY | DYAVG | RITRLGN | RITRLGN | GRTLAST |
| | GFTFSDYAVGWFRQAPGKEREFVARIT | AVG (SEQ | (SEQ ID | GPY (SEQ | GPYYSAS | HDTKTSP |
| | RLGNGPYYSASVKGRFTISRDNARDMA | ID NO: | NO: 1275) | ID NO: | VKG (SEQ | QTYDY |
| | YLKMDALTPEDTATYYCAAGRTLASTH | 1241) | | 1305) | ID NO: | (SEQ ID |
| | DTKTSPQTYDYWGLGTQVTVSS (SEQ | | | | 1345) | NO: 1379) |
| | ID NO: 1430) | | | | | |
| 2CL55 | QVQLQESGGGWVQPGDSLRLSCAAS | GSTFSDY | DYAVG | RITRLGN | RITRLGN | GRTLAST |
| | GSTFSDYAVGWFRQAPGKEREFVARIT | AVG (SEQ | (SEQ ID | GPY (SEQ | GPYYSAS | HDTKTSP |
| | RLGNGPYYSASVKGRFTISRDNARDMA | ID NO: | NO: 1275) | ID NO: | VKG (SEQ | QTYDY |
| | YLKMDALTPEDTATYYCAAGRTLASTH | 1242) | | 1305) | ID NO: | (SEQ ID |
| | DTKTSPQTYDYWGQGTQVTVSS (SEQ | | | | 1345) | NO: 1379) |
| | ID NO: 1431) | | | | | |
| 1CL47 | QVQLQESGGGLVQAGGSRRLSCAASG | GRTFINY | NYAMG | AISTSGS | AISTSGS | RLSFDDS |
| | RTFINYAMGWFRQAPGKEREFVAAIST | AMG | (SEQ ID | NTY (SEQ | NTYLADS | AYYTSTL |
| | SGSNTYLADSLKARFTISRDNAKNTVYL | (SEQ ID | NO: 1270) | ID NO: | LKA (SEQ | RYAY |
| | QIRSLNPEDTAVYYCAARLSFDDSAYYT | NO: 1243) | | 1306) | ID NO: | (SEQ ID |
| | STLRYAYWGQGTQVTVSS (SEQ ID | | | | 1346) | NO: 1380) |
| | NO: 1432) | | | | | |
| 2CL59 | QVQLQESGGGLVQPGDSLTLSCADSG | GRTFSNY | NYAMG | AISTSGG | AISTSGG | RLSFSGS |
| | RTFSNYAMGWFHQAPGKEREFVAAIST | AMG | (SEQ ID | STA (SEQ | STAYADS | SYYQGPL |
| | SGGSTAYADSVKGRFTISRDNAKNTVY | (SEQ ID | NO: 1270) | ID NO: | VKG (SEQ | QYPY |
| | LQMNNLKPEDTAVYYCAARLSFSGSSY | NO: 1235) | | 1307) | ID NO: | (SEQ ID |
| | YQGPLQYPYWGQGTQVTVSS (SEQ ID | | | | 1347) | NO: 1381) |
| | NO: 1433) | | | | | |
| 2CL16 | QVQLQESGGGLVQPGGSLRLSCAASG | GDTFSNY | NYAMG | AISRSAG | AISRSAG | RLTFNLID |
| | DTFSNYAMGWFRQAPGKAREFVAAIS | AMG | (SEQ ID | STY (SEQ | STYHVDS | YYTAETR |
| | RSAGSTYHVDSVKGRFTISRDNAMNTV | (SEQ ID | NO: 1270) | ID NO: | VKG (SEQ | YTY (SEQ |
| | YLQMNSLQPEDTAHYYCAARLTFNLID | NO: 1245) | | 1308) | ID NO: | ID NO: |
| | YYTAETRYTYWGQGTQVTVSS (SEQ | | | | 1348) | 1382) |
| | ID NO: 1434) | | | | | |
| 2CL91 | QVQLQESGGGLVQAGDSLRLSCTASE | ERTFSNY | NYAMG | AISTSGG | AISTSGG | RLDFSST |
| | RTFSNYAMGWFRLAPGKERKFVAAIST | AMG | (SEQ ID | TTD (SEQ | TTDYVDS | DLYTTAP |
| | SGGTTDYVDSVKGRFTISRDNAKNTVY | (SEQ ID | NO: 1270) | ID NO: | VKG (SEQ | RYPY |
| | LQMNSLKPEDTAVYYCAARLDFSSTDL | NO: 1246) | | 1309) | ID NO: | (SEQ ID |
| | YTTAPRYPYWGQGTQVTVSS (SEQ ID | | | | 1349) | NO: 1383) |
| | NO: 1435) | | | | | |
| 2CL15 | QVQLQESGGGLVQPGGSVRLSCAASV | VFTLNNFI | NFIMS | DINMVGI | DINMVGI | GRPIGLY |
| | FTLNNFIMSWVRQAPGKGLERVSDINM | MS (SEQ | (SEQ ID | TD (SEQ | TDYSDPV | YPSPRIR |
| | VGITDYSDPVKGRFTISRDNKQNTVYLQ | ID NO: | NO: 1276) | ID NO: | KG (SEQ | DYND |
| | GNTLKPEDTAVYFCAAGRPIGLYYPSP | 1247) | | 1310) | ID NO: | (SEQ ID |
| | RIRDYNDWGQGTQVTVSS (SEQ ID | | | | 1350) | NO: 1384) |
| | NO: 1436) | | | | | |
| 2CL81 | QVQLQESGGGLVQAGDSLKLSCAASG | GRTFSTY | TYAMG | AIATNGG | AIATNGG | RLSFGSG |
| | RTFSTYAMGWFRQAPGKERDVVAAIAT | AMG | (SEQ ID | TTY (SEQ | TTYYVDS | YYTNKLN |
| | NGGTTYYVDSVKGRFTISRDNAQNRVY | (SEQ ID | NO: 1277) | ID NO: | VKG (SEQ | YAY (SEQ |
| | LQMNSLKPEDTAIYYCAARLSFGSGYY | NO: 1248) | | 1311) | ID NO: | ID NO: |
| | TNKLNYAYWGQGTQVTVSS (SEQ ID | | | | 1351) | 1385) |
| | NO: 1437) | | | | | |
| 1CL81 | QVQLQESGGGLVQAGNSLKLSCAASG | GRNLAYY | YYVMG | TLTRGGD | TLTRGGD | RLAVLSS |
| | RNLAYYVMGWFRQAPGREREPVATLT | VMG | (SEQ ID | DTY (SEQ | DTYCADS | NTYCSGL |
| | RGGDDTYCADSVKGRFTISSDNAKNTV | (SEQ ID | NO: 1278) | ID NO: | VKG (SEQ | WDY |
| | YLQMNNLKPEDTAIYTCAARLAVLSSNT | NO: 1249) | | 1312) | ID NO: | (SEQ ID |
| | YCSGLWDYWGQGTQVTVSS (SEQ ID | | | | 1352) | NO: 1386) |
| | NO: 1438) | | | | | |
| 1CL56 | QVQLQESGGGLVQPGGSLTLSCGASG | GFDFSDY | DYVMY | SINASGV | SINASGV | VGQAPM |
| | FDFSDYVMYWLRQAPGKGLQWVSSIN | VMY (SEQ | (SEQ ID | RTY (SEQ | RTYYVDA | YFGVDF |
| | ASGVRTYYVDALKGRFTISRDNAKNTL | ID NO: | NO: 1279) | ID NO: | LKG (SEQ | (SEQ ID |
| | YLQIDDLKPEDTGLYYCARVGQAPMYF | 1250) | | 1313) | ID NO: | NO: 1387) |
| | GVDFWGNGTQVTVSS (SEQ ID NO: | | | | 1353) | |
| | 1439) | | | | | |
| 2CL40 | QVQLQESGGGLVQTGGSLRVSCAASG | GRSISNY | NYNMG | SIRWDGD | SIRWDGD | TVSSFDE |
| | RSISNYNMGWFRQPPGKEREIVGSIRW | NMG | (SEQ ID | STY (SEQ | STYYADS | SKNPRW |
| | DGDSTYYADSVKGRFTISRDNTKNTVY | (SEQ ID | NO: 1280) | ID NO: | VKG (SEQ | YPY (SEQ |
| | LQMNSLKSEDTADYYCAATVSSFDESK | NO: 1251) | | 1314) | ID NO: | ID NO: |
| | NPRWYPYWGQGTQVTVSS (SEQ ID | | | | 1354) | 1388) |
| | NO: 1440) | | | | | |
| 2CL65 | QVQLQESGGGLVQPGGSLRLSCAASG | GRIFSINA | INAMG | VISRSGIS | VISRSGIS | DVLLTFN |
| | RIFSINAMGWYRQAPGKQRELVAVISR | MG (SEQ | (SEQ ID | N (SEQ ID | NYVDSVK | KREDS |
| | SGISNYVDSVKGRFTISRDNAKNTVYLQ | ID NO: | NO: 1281) | NO: 1315) | G (SEQ ID | (SEQ ID |
| | MNSLNPEDTADYYCNADVLLTFNKRED | 1252) | | | NO: 1355) | NO: 1389) |
| | SWGQGTQVTVSS (SEQ ID NO: | | | | | |
| | 1441) | | | | | |
| 2CL57 | QVQLQESGGGLVQAGGSLKLSCAASG | GRTFSSY | SYAMG | VISWRNN | VISWRNN | AGLGAVV |
| | RTFSSYAMGWFRQAPGKERDFVAVIS | AMG | (SEQ ID | TY (SEQ | TYYADSV | AGMSDY |
| | WRNNTYYADSVKGRFTISRDNAKNTVH | (SEQ ID | NO: 1282) | ID NO: | KG (SEQ | DY (SEQ |
| | LQMNSLKSEDTAVYYCAAAGLGAVVAG | NO: 1253) | | 1316) | ID NO: | ID NO: |
| | MSDYDYWGQGTQVTVSS (SEQ ID | | | | 1356) | 1390) |
| | NO: 1442) | | | | | |
| 2CL56 | QVQLQESGGGSVQAGDSLTLSCIASGR | GRTFSSL | SLAMG | AINWSGD | AINWSGD | DASGYG |
| | TFSSLAMGWFRQAPGKEREFVAAINW | AMG | (SEQ ID | STY (SEQ | STYYSDS | SAWPDR |
| | SGDSTYYSDSMKGRLTMSRDNAKNTV | (SEQ ID | NO: 1283) | ID NO: | MKG | YDY (SEQ |
| | FLQMNSLEPEDTAVYVCAADASGYGSA | NO: 1254) | | 1317) | (SEQ ID | ID NO: |
| | WPDRYDYWGQGTQVTVSS (SEQ ID | | | | NO: 1357) | 1391) |
| | NO: 1443) | | | | | |
| 2CL66 | QVQLQESGGGLVQAGGSLRLSCAASE | ERTFTNY | NYAMG | AISRSGS | AISRSGS | APLVLKT |
| | RTFTNYAMGWFRQGPGKDRAFVAAIS | AMG | (SEQ ID | STS (SEQ | STSYADS | TPGAYNY |
| | RSGSSTSYADSVKGRFTISRDNAENILY | (SEQ ID | NO: 1270) | ID NO: | VKG (SEQ | (SEQ ID |
| | LQMNSLKPEDTAVYYCAAAPLVLKTTP | NO: 1255) | | 1318) | ID NO: | NO: 1392) |
| | GAYNYWGQGTQVTVSS (SEQ ID NO: | | | | 1358) | |
| | 1444) | | | | | |
| 2CL34 | QVQLQESGGGLVQAGGSLRLSCAASG | GRTFTNY | NYAMG | TISRSGS | TISRSGS | NVLVTTT |
| | RTFTNYAMGWFRQAPGKEREFVATISR | AMG | (SEQ ID | MPY (SEQ | MPYYAD | RLDQYDS |
| | SGSMPYYADSVKGRFTISRDNAKNMVY | (SEQ ID | NO: 1270) | ID NO: | SVKG | (SEQ ID |
| | LQMNSLKPEDTAVYYCAANVLVTTTRL | NO: 1256) | | 1319) | (SEQ ID | NO: 1393) |
| | DQYDSWGQGTQVTVSS (SEQ ID | | | | NO: 1359) | |
| | NO: 1445) | | | | | |
| 2CL46 | QVQLQESGGGLVQAGGSLRLSCAVSG | GRTFSSY | SYAMG | AVEWSS | AVEWSS | DHTGKLV |
| | RTFSSYAMGWFRQARGKEREFVAAVE | AMG | (SEQ ID | GSTF | GSTFYTD | FSKTSDY |
| | WSSGSTFYTDSVKGRFAISRDIAKNTVY | (SEQ ID | NO: 1282) | (SEQ ID | SVKG | (SEQ ID |
| | LQMNSLKPEDTAVYYCAGDHTGKLVFS | NO: 1253) | | NO: 1320) | (SEQ ID | NO: 1394) |
| | KTSDYWGQGTQVTVSS (SEQ ID NO: | | | | NO: 1360) | |
| | 1446) | | | | | |
| 2CL29 | QVQLQESGGGLVQPGDSLRLSCTASE | ERTFTNY | NYAMA | TISRSGS | TISRSGS | RPLVPSE |
| | RTFTNYAMAWFRQAPGKERDVLATISR | AMA (SEQ | (SEQ ID | STF (SEQ | STFYAES | DPDNYN |
| | SGSSTFYAESVKGRFTISRDNTKNTVYL | ID NO | NO: 1284) | ID NO: | VKG (SEQ | Y (SEQ ID |
| | QMNSLEPEDTAVYYCAARPLVPSEDPD | 1257) | | 1321) | ID NO: | NO: 1395) |
| | NYNYWGQGTQVTVSS (SEQ ID NO: | | | | 1361) | |
| | 1447) | | | | | |
| 1CL88 | QVQLQESGGGLVQAGGSLRLSCAASG | GRIFSNS | NSAMG | AISENSSI | AISENSSI | YGSTTIR |
| | RIFSNSAMGWFRQVLGKEREFVAAISE | AMG | (SEQ ID | LY (SEQ | LYYTASV | TTTRPTK |
| | NSSILYYTASVKGRFTISRDNDKNTVYL | (SEQ ID | NO: 1285) | ID NO: | KG (SEQ | (SEQ ID |
| | QMTSLKAEDTAVYYCAGYGSTTIRTTT | NO: 1258) | | 1322) | ID NO: | NO: 1396) |
| | RPTKWGQGTQVTVSS (SEQ ID NO: | | | | 1362) | |
| | 1448) | | | | | |
| 2CL68 | QVQLQESGGGLVQAGDSLRLSCVASG | GDTFSM | MYAMG | YISRTGG | YISRTGG | HYNGVY |
| | RTLSNYGMGWFRQAPGKGREFVAYIS | YAMG | (SEQ ID | STK (SEQ | STKYENS | QDSQSY |
| | RTGGSTKYENSVKGRFIISRDTAKNTIY | (SEQ ID | NO: 1267) | ID NO: | VKG (SEQ | DY (SEQ |
| | LQMNSLQGEDTAVYYCAFHYNGVYQD | NO: 1231) | | 1323) | ID NO: | ID NO: |
| | SQSYDYWGXGTQVTVSS (SEQ ID | | | | 1363) | 1397) |
| | NO: 1449) | | | | | |
| 1CL82 | QVQLQESGGGSVQAGDSLRLSCVAPG | GREISSP | SPAMG | TINWSSG | TINWSSG | GATGVFR |
| | REISSPAMGWFRQAPGKEREFVATINW | AMG | (SEQ ID | ATL (SEQ | ATLTADS | IARAYSY |
| | SSGATLTADSVKGRFTIFKDVEKNTVYL | (SEQ ID | NO: 1286) | ID NO: | VKG (SEQ | (SEQ ID |
| | QMNSLRPEDTAVYSCAAGATGVFRIAR | NO: 1259) | | 1324) | ID NO: | NO: 1398) |
| | AYSYWGQGTQVTVSS (SEQ ID NO: | | | | 1364) | |
| | 1450) | | | | | |
| 2CL49 | QVQLQESGGGLMQAGDSLRLSCTVSG | GRDFAN | NDAVA | GIGSNNG | GIGSNNG | GPTFFRI |
| | RDFANDAVAWFRXPPGKEREFVVGIGS | DAVA | (SEQ ID | TL (SEQ | TLTADSV | ARAYPY |
| | NNGTLTADSVKGRSTIWRDNIKNTVYL | (SEQ ID | NO: 1287) | ID NO: | KG (SEQ | (SEQ ID |
| | QMSRLTPDDTAVYYCASGPTFFRIARA | NO: 1260) | | 1325) | ID NO: | NO: 1399) |
| | YPYWGQGTQVTVSS (SEQ ID NO: | | | | 1365) | |
| | 1451) | | | | | |
| 1CL72 | QVQLQESGGGLVQPGESLKLSCAGSG | GSTFRHH | HHAMA | AINDHGD | AINDHGD | GPLVDYL |
| revised | STFRHHAMAWFRQTPGKEREFVSAIND | AMA (SEQ | (SEQ ID | RTK (SEQ | RTKYLDS | ETTPLVY |
| | HGDRTKYLDSVRGRFTISRDNTNNMVY | ID NO: | NO: 1264) | ID NO: | VRG (SEQ | TY (SEQ |
| | LQMSDLRPEDTANYSCAAGPLVDYLET | 1227) | | 1290) | ID NO: | ID NO: |
| | TPLVYTYWGQGTQVTVSS (SEQ ID | | | | 1327) | 1367) |
| | NO: 1452) | | | | | |
| 2CL25 | QVQLQESGGGSVQAGGSLRLSCAASG | GRTFSNY | NYAMG | TISVSGS | TISVSGS | RLSFDNT |
| revised | RTFSNYAMGWFRQTPGKEREFVATISV | AMG | (SEQ ID | STD (SEQ | STDYADS | ALYTSAN |
| | SGSSTDYADSVKGRFTISRDNAKKTVY | (SEQ ID | NO: 1270) | ID NO: | VKG (SEQ | RYSY |
| | LQINSLKTEDTAVYYCAARLSFDNTALY | NO: 1235) | | 1298) | ID NO: | (SEQ ID |
| | TSANRYSYWGQGTQVTVSS (SEQ ID | | | | 1338) | NO: 1373) |
| | NO: 1453) | | | | | |
| 2CL68 | QVQLQESGGGLVQAGDSLRLSCVASG | GDTFSM | MYAMG | YISRTGG | YISRTGG | HYNGVY |
| revised | RTLSNYGMGWFRQAPGKGREFVAYIS | YAMG | (SEQ ID | STK (SEQ | STKYENS | QDSQSY |
| | RTGGSTKYENSVKGRFIISRDTAKNTIY | (SEQ ID | NO: 1267) | ID NO: | VKG (SEQ | DY (SEQ |
| | LQMNSLQGEDTAVYYCAFHYNGVYQD | NO: 1231) | | 1323) | ID NO: | ID NO: |
| | SQSYDYWGQGTQVTVSS (SEQ ID | | | | 1363) | 1397) |
| | NO: 1454) | | | | | |
| 2CL49 | QVQLQESGGGLMQAGDSLRLSCTVSG | GRDFAN | NDAVA | GIGSNNG | GIGSNNG | GPTFFRI |
| revised | RDFANDAVAWFRQPPGKEREFVVGIG | DAVA | (SEQ ID | TL (SEQ | TLTADSV | ARAYPY |
| | SNNGTLTADSVKGRSTIWRDNIKNTVYL | (SEQ ID | NO: 1287) | ID NO | KG (SEQ | (SEQ ID |
| | QMSRLTPDDTAVYYCASGPTFFRIARA | NO: 1260) | | 1325) | ID NO: | NO: 1399) |
| | YPYWGQGTQVTVSS (SEQ ID NO: | | | | 1365) | |
| | 1455) | | | | | |

What is claimed is:

1.-17. (canceled)

18. A Clec4C binding agent comprising at least one targeting moiety comprising three complementarity determining regions (CDR1, CDR2, and CDR3), wherein:
(a) CDR1 comprises an amino acid sequence selected from any one of SEQ ID NOs: 1237, 1227-1236 and 1238-1288;
(b) CDR2 comprises an amino acid sequence selected from any one of SEQ ID NO: 1300, 1289-1299 and 1301-1365; and
(c) CDR3 comprises an amino acid sequence selected from any one of SEQ ID NO: 1375, 1366-1374, and 1376-1399.

19. The Clec4C binding agent of claim 18, wherein the targeting moiety is a single-domain antibody, a recombinant heavy-chain-only antibody (VHH), a single-chain antibody (scFv), a shark heavy-chain-only antibody (VNAR), a Fv, or a Fab.

20. The Clec4C binding agent of claim 18, wherein the targeting moiety is a single-domain antibody.

21.-185. (canceled)

186. The Clec4C binding agent of claim 18, wherein the targeting moiety comprises one or more of:
a CDR1 comprising the amino acid sequence of SEQ ID NO: 1227 or 1264, a CDR2 comprising the amino acid sequence of SEQ ID NO: 1289 or 1326, and a CDR3 comprising the amino acid sequence of SEQ ID NO: 1366;
CDR1 comprising the amino acid sequence of SEQ ID NO: 1227 or 1264, a CDR2 comprising the amino acid sequence of SEQ ID NO: 1290 or 1327, and a CDR3 comprising the amino acid sequence of SEQ ID NO: 1367;
CDR1 comprising the amino acid sequence of SEQ ID NO: 1227 or 1264, a CDR2 comprising the amino acid sequence of SEQ ID NO: 1291 or 1328, and a CDR3 comprising the amino acid sequence of SEQ ID NO: 1366;
CDR1 comprising the amino acid sequence of SEQ ID NO: 1227 or 1264, a CDR2 comprising the amino acid sequence of SEQ ID NO: 1290 or 1327, and a CDR3 comprising the amino acid sequence of SEQ ID NO: 1367;
CDR1 comprising the amino acid sequence of SEQ ID NO: 1227 or 1264, a CDR2 comprising the amino acid sequence of SEQ ID NO: 1289 or 1326, and a CDR3 comprising the amino acid sequence of SEQ ID NO: 1366;
CDR1 comprising the amino acid sequence of SEQ ID NO: 1228 or 1265, a CDR2 comprising the amino acid sequence of SEQ ID NO: 1289 or 1326, and a CDR3 comprising the amino acid sequence of SEQ ID NO: 1366;
CDR1 comprising the amino acid sequence of SEQ ID NO: 1227 or 1264, a CDR2 comprising the amino acid sequence of SEQ ID NO: 1290 or 1327, and a CDR3 comprising the amino acid sequence of SEQ ID NO: 1367;
CDR1 comprising the amino acid sequence of SEQ ID NO: 1227 or 1264, a CDR2 comprising the amino acid sequence of SEQ ID NO: 1290 or 1329, and a CDR3 comprising the amino acid sequence of SEQ ID NO: 1367;
CDR1 comprising the amino acid sequence of SEQ ID NO: 1229 or 1264, a CDR2 comprising the amino acid sequence of SEQ ID NO: 1290 or 1330, and a CDR3 comprising the amino acid sequence of SEQ ID NO: 1367;
CDR1 comprising the amino acid sequence of SEQ ID NO: 1230 or 1266, a CDR2 comprising the amino acid sequence of SEQ ID NO: 1292 or 1331, and a CDR3 comprising the amino acid sequence of SEQ ID NO: 1368;
CDR1 comprising the amino acid sequence of SEQ ID NO: 1230 or 1266, a CDR2 comprising the amino acid sequence of SEQ ID NO: 1292 or 1332, and a CDR3 comprising the amino acid sequence of SEQ ID NO: 1368;
CDR1 comprising the amino acid sequence of SEQ ID NO: 1231 or 1267, a CDR2 comprising the amino acid sequence of SEQ ID NO: 1293 or 1333, and a CDR3 comprising the amino acid sequence of SEQ ID NO: 1369;
CDR1 comprising the amino acid sequence of SEQ ID NO: 1232 or 1268, a CDR2 comprising the amino acid sequence of SEQ ID NO: 1294 or 1334, and a CDR3 comprising the amino acid sequence of SEQ ID NO: 1369;
CDR1 comprising the amino acid sequence of SEQ ID NO: 1231 or 1267, a CDR2 comprising the amino acid sequence of SEQ ID NO: 1295 or 1335, and a CDR3 comprising the amino acid sequence of SEQ ID NO: 1370;
CDR1 comprising the amino acid sequence of SEQ ID NO: 1233 or 1267, a CDR2 comprising the amino acid sequence of SEQ ID NO: 1294 or 1334, and a CDR3 comprising the amino acid sequence of SEQ ID NO: 1371;
CDR1 comprising the amino acid sequence of SEQ ID NO: 1234 or 1269, a CDR2 comprising the amino acid sequence of SEQ ID NO: 1296 or 1336, and a CDR3 comprising the amino acid sequence of SEQ ID NO: 1372;
CDR1 comprising the amino acid sequence of SEQ ID NO: 1234 or 1269, a CDR2 comprising the amino acid sequence of SEQ ID NO: 1297 or 1337, and a CDR3 comprising the amino acid sequence of SEQ ID NO: 1372;
CDR1 comprising the amino acid sequence of SEQ ID NO: 1235 or 1270, a CDR2 comprising the amino acid sequence of SEQ ID NO: 1298 or 1338, and a CDR3 comprising the amino acid sequence of SEQ ID NO: 1373;
CDR1 comprising the amino acid sequence of SEQ ID NO: 1236 or 1271, a CDR2 comprising the amino acid sequence of SEQ ID NO: 1299 or 1339, and a CDR3 comprising the amino acid sequence of SEQ ID NO: 1374;
CDR1 comprising the amino acid sequence of SEQ ID NO: 1237 or 1272, a CDR2 comprising the amino acid sequence of SEQ ID NO: 1300 or 1340, and a CDR3 comprising the amino acid sequence of SEQ ID NO: 1375;
CDR1 comprising the amino acid sequence of SEQ ID NO: 1238 or 1272, a CDR2 comprising the amino acid sequence of SEQ ID NO: 1301 or 1341, and a CDR3 comprising the amino acid sequence of SEQ ID NO: 1376;
CDR1 comprising the amino acid sequence of SEQ ID NO: 1236 or 1271, a CDR2 comprising the amino acid sequence of SEQ ID NO: 1302 or 1342, and a CDR3 comprising the amino acid sequence of SEQ ID NO: 1376;
CDR1 comprising the amino acid sequence of SEQ ID NO: 1239 or 1273, a CDR2 comprising the amino acid sequence of SEQ ID NO: 1303 or 1343, and a CDR3 comprising the amino acid sequence of SEQ ID NO: 1377;
CDR1 comprising the amino acid sequence of SEQ ID NO: 1239 or 1273, a CDR2 comprising the amino acid sequence of SEQ ID NO: 1304 or 1344, and a CDR3 comprising the amino acid sequence of SEQ ID NO: 1378;
CDR1 comprising the amino acid sequence of SEQ ID NO: 1240 or 1274, a CDR2 comprising the amino acid sequence of SEQ ID NO: 1304 or 1344, and a CDR3 comprising the amino acid sequence of SEQ ID NO: 1378;
CDR1 comprising the amino acid sequence of SEQ ID NO: 1241 or 1275, a CDR2 comprising the amino acid sequence of SEQ ID NO: 1305 or 1345, and a CDR3 comprising the amino acid sequence of SEQ ID NO: 1379;
CDR1 comprising the amino acid sequence of SEQ ID NO: 1242 or 1275, a CDR2 comprising the amino acid sequence of SEQ ID NO: 1305 or 1345, and a CDR3 comprising the amino acid sequence of SEQ ID NO: 1379;
CDR1 comprising the amino acid sequence of SEQ ID NO: 1243 or 1270, a CDR2 comprising the amino acid sequence of SEQ ID NO: 1306 or 1346, and a CDR3 comprising the amino acid sequence of SEQ ID NO: 1380;
CDR1 comprising the amino acid sequence of SEQ ID NO: 1235 or 1270, a CDR2 comprising the amino acid sequence of SEQ ID NO: 1307 or 1347, and a CDR3 comprising the amino acid sequence of SEQ ID NO: 1381;
CDR1 comprising the amino acid sequence of SEQ ID NO: 1245 or 1270, a CDR2 comprising the amino acid sequence of SEQ ID NO: 1308 or 1348, and a CDR3 comprising the amino acid sequence of SEQ ID NO: 1382;
CDR1 comprising the amino acid sequence of SEQ ID NO: 1246 or 1270, a CDR2 comprising the amino acid sequence of SEQ ID NO: 1309 or 1349, and a CDR3 comprising the amino acid sequence of SEQ ID NO: 1383;
CDR1 comprising the amino acid sequence of SEQ ID NO: 1247 or 1276, a CDR2 comprising the amino acid sequence of SEQ ID NO: 1310 or 1350, and a CDR3 comprising the amino acid sequence of SEQ ID NO: 1384;
CDR1 comprising the amino acid sequence of SEQ ID NO: 1248 or 1277, a CDR2 comprising the amino acid sequence of SEQ ID NO: 1311 or 1351, and a CDR3 comprising the amino acid sequence of SEQ ID NO: 1385;
CDR1 comprising the amino acid sequence of SEQ ID NO: 1249 or 1278, a CDR2 comprising the amino acid sequence of SEQ ID NO: 1312 or 1352, and a CDR3 comprising the amino acid sequence of SEQ ID NO: 1386;
CDR1 comprising the amino acid sequence of SEQ ID NO: 1250 or 1279, a CDR2 comprising the amino acid sequence of SEQ ID NO: 1313 or 1353, and a CDR3 comprising the amino acid sequence of SEQ ID NO: 1387;
CDR1 comprising the amino acid sequence of SEQ ID NO: 1251 or 1280, a CDR2 comprising the amino acid sequence of SEQ ID NO: 1314 or 1354, and a CDR3 comprising the amino acid sequence of SEQ ID NO: 1388;
CDR1 comprising the amino acid sequence of SEQ ID NO: 1252 or 1281, a CDR2 comprising the amino acid sequence of SEQ ID NO: 1315 or 1355, and a CDR3 comprising the amino acid sequence of SEQ ID NO: 1389;
CDR1 comprising the amino acid sequence of SEQ ID NO: 1253 or 1282, a CDR2 comprising the amino acid sequence of SEQ ID NO: 1316 or 1356, and a CDR3 comprising the amino acid sequence of SEQ ID NO: 1390;
CDR1 comprising the amino acid sequence of SEQ ID NO: 1254 or 1283, a CDR2 comprising the amino acid sequence of SEQ ID NO: 1317 or 1357, and a CDR3 comprising the amino acid sequence of SEQ ID NO: 1391;
CDR1 comprising the amino acid sequence of SEQ ID NO: 1255 or 1270, a CDR2 comprising the amino acid sequence of SEQ ID NO: 1318 or 1358, and a CDR3 comprising the amino acid sequence of SEQ ID NO: 1392;
CDR1 comprising the amino acid sequence of SEQ ID NO: 1256 or 1270, a CDR2 comprising the amino acid sequence of SEQ ID NO: 1319 or 1359, and a CDR3 comprising the amino acid sequence of SEQ ID NO: 1393;
CDR1 comprising the amino acid sequence of SEQ ID NO: 1253 or 1282, a CDR2 comprising the amino acid sequence of SEQ ID NO: 1320 or 1360, and a CDR3 comprising the amino acid sequence of SEQ ID NO: 1394;
CDR1 comprising the amino acid sequence of SEQ ID NO: 1257 or 1284, a CDR2 comprising the amino acid sequence of SEQ ID NO: 1321 or 1361, and a CDR3 comprising the amino acid sequence of SEQ ID NO: 1395;
CDR1 comprising the amino acid sequence of SEQ ID NO: 1258 or 1285, a CDR2 comprising the amino acid sequence of SEQ ID NO: 1322 or 1362, and a CDR3 comprising the amino acid sequence of SEQ ID NO: 1396;
CDR1 comprising the amino acid sequence of SEQ ID NO: 1231 or 1267, a CDR2 comprising the amino acid sequence of SEQ ID NO: 1323 or 1363, and a CDR3 comprising the amino acid sequence of SEQ ID NO: 1397;
CDR1 comprising the amino acid sequence of SEQ ID NO: 1259 or 1286, a CDR2 comprising the amino acid sequence of SEQ ID NO: 1324 or 1364, and a CDR3 comprising the amino acid sequence of SEQ ID NO: 1398;
CDR1 comprising the amino acid sequence of SEQ ID NO: 1260 or 1287, a CDR2 comprising the amino acid sequence of SEQ ID NO: 1325 or 1365, and a CDR3 comprising the amino acid sequence of SEQ ID NO: 1399;
CDR1 comprising the amino acid sequence of SEQ ID NO: 1227 or 1264, a CDR2 comprising the amino acid sequence of SEQ ID NO: 1290 or 1327, and a CDR3 comprising the amino acid sequence of SEQ ID NO: 1367;
CDR1 comprising the amino acid sequence of SEQ ID NO: 1235 or 1270, a CDR2 comprising the amino acid sequence of SEQ ID NO: 1298 or 1338, and a CDR3 comprising the amino acid sequence of SEQ ID NO: 1373;
CDR1 comprising the amino acid sequence of SEQ ID NO: 1231 or 1267, a CDR2 comprising the amino acid sequence of SEQ ID NO: 1323 or 1363, and a CDR3 comprising the amino acid sequence of SEQ ID NO: 1397; and
CDR1 comprising the amino acid sequence of SEQ ID NO: 1260 or 1287, a CDR2 comprising the amino acid sequence of SEQ ID NO: 1325 or 1365, and a CDR3 comprising the amino acid sequence of SEQ ID NO: 1399.

187. The Clec4C binding agent of claim 186, wherein the targeting moiety comprises an amino acid sequence having at least 95% identity to any one of SEQ ID NOs: 1424, 1400-1423 and 1425-1455.

188. A recombinant nucleic acid encoding the Clec4C binding agent of claim 18.

189. A host cell comprising the recombinant nucleic acid of claim 188.

190. A method for treating cancer, comprising administering to a patient in need thereof an effective amount of the Clec4C binding agent of claim 18.

191. A method for treating an autoimmune disease, comprising administering to a patient in need thereof an effective amount of the Clec4C binding agent of claim 18.

The application's sequence listing, which the Patent Office published only in electronic form, follows.

SEQUENCE LISTING (1473 sequences)

SEQ ID NO: 1 - protein, 504 aa, synthetic construct
  REGION 1..504: note = Artificial polymer
MEPAGPAPGRLGPLLCLLLAASCAWSGVAGEEELQVIQPDKSVLVAAGETATLRCTATSLIPVGPIQWFRGAGPGRELIYNQKEGHFPRVTTVSDLTKRNNMDFSIRIGNITPADAGTYYCVKFRKGSPDDVEFKSGAGTELSVRAKPSAPVVSGPAARATPQHTVSFTCESHGFSPRDITLKWFKNGNELSDFQTNVDPVGESVSYSIHSTAKVVLTREDVHSQVICEVAHVTLQGDPLRGTANLSETIRVPPTLEVTQQPVRAENQVNVTCQVRKFYPQRLQLTWLENGNVSRTETASTVTENKDGTYNWMSWLLVNVSAHRDDVKLTCQVEHDGQPAVSKSHDLKVSAHPKEQGSNTAAENTGSNERNIYIVVGVVCTLLVALLMAALYLVRIRQKKAQGSTSSTRLHEPEKNAREITQDTNDITYADLNLPKGKKPAPQAAEPNNHTEYASIQTSPQPASEDTLTYADLDMVHLNRTPKQPAPKPEPSFSEYASVQVPRK

SEQ ID NO: 2 - protein, 474 aa, synthetic construct
  REGION 1..474: note = Artificial polymer
EEELQVIQPDKSVLVAAGETATLRCTATSLIPVGPIQWFRGAGPGRELIYNQKEGHFPRVTTVSDLTKRNNMDFSIRIGNITPADAGTYYCVKFRKGSPDDVEFKSGAGTELSVRAKPSAPVVSGPAARATPQHTVSFTCESHGFSPRDITLKWFKNGNELSDFQTNVDPVGESVSYSIHSTAKVVLTREDVHSQVICEVAHVTLQGDPLRGTANLSETIRVPPTLEVTQQPVRAENQVNVTCQVRKFYPQRLQLTWLENGNVSRTETASTVTENKDGTYNWMSWLLVNVSAHRDDVKLTCQVEHDGQPAVSKSHDLKVSAHPKEQGSNTAAENTGSNERNIYIVVGVVCTLLVALLMAALYLVRIRQKKAQGSTSSTRLHEPEKNAREITQDTNDITYADLNLPKGKKPAPQAAEPNNHTEYASIQTSPQPASEDTLTYADLDMVHLNRTPKQPAPKPEPSFSEYASVQVPRK

SEQ ID NO: 3 - protein, 508 aa, synthetic construct
  REGION 1..508: note = Artificial polymer
MEPAGPAPGRLGPLLCLLLAASCAWSGVAGEEELQVIQPDKSVLVAAGETATLRCTATSLIPVGPIQWFRGAGPGRELIYNQKEGHFPRVTTVSDLTKRNNMDFSIRIGNITPADAGTYYCVKFRKGSPDDVEFKSGAGTELSVRAKPSAPVVSGPAARATPQHTVSFTCESHGFSPRDITLKWFKNGNELSDFQTNVDPVGESVSYSIHSTAKVVLTREDVHSQVICEVAHVTLQGDPLRGTANLSETIRVPPTLEVTQQPVRAENQVNVTCQVRKFYPQRLQLTWLENGNVSRTETASTVTENKDGTYNWMSWLLVNVSAHRDDVKLTCQVEHDGQPAVSKSHDLKVSAHPKEQGSNTAAENTGSNERNIYIVVGVVCTLLVALLMAALYLVRIRQKKAQGSTSSTRLHEPEKNAREITQVQSLDTNDITYADLNLPKGKKPAPQAAEPNNHTEYASIQTSPQPASEDTLTYADLDMVHLNRTPKQPAPKPEPSFSEYASVQVPRK

SEQ ID NO: 4 - protein, 503 aa, synthetic construct
  REGION 1..503: note = Artificial polymer
MEPAGPAPGRLGPLLCLLLAASCAWSGVAGEEELQVIQPDKSVLVAAGETATLRCTATSLIPVGPIQWFRGAGPGRELIYNQKEGHFPRVTTVSDLTKRNNMDFSIRIGNITPADAGTYYCVKFRKGSPDVEFKSGAGTELSVRAKPSAPVVSGPAARATPQHTVSFTCESHGFSPRDITLKWFKNGNELSDFQTNVDPVGESVSYSIHSTAKVVLTREDVHSQVICEVAHVTLQGDPLRGTANLSETIRVPPTLEVTQQPVRAENQVNVTCQVRKFYPQRLQLTWLENGNVSRTETASTVTENKDGTYNWMSWLLVNVSAHRDDVKLTCQVEHDGQPAVSKSHDLKVSAHPKEQGSNTAAENTGSNERNIYIVVGVVCTLLVALLMAALYLVRIRQKKAQGSTSSTRLHEPEKNAREITQDTNDITYADLNLPKGKKPAPQAAEPNNHTEYASIQTSPQPASEDTLTYADLDMVHLNRTPKQPAPKPEPSFSEYASVQVPRK

SEQ ID NO: 5-45 - skipped (41 entries)

SEQ ID NO: 46 - protein, 165 aa, synthetic construct
  REGION 1..165: note = Artificial polymer
CDLPQTHSLGSRRTLMLLAQMRKISLFSCLKDRHDFGFPQEEFGNQFQKAETIPVLHEMIQQIFNLFSTKDSSAAWDETLLDKFYTELYQQLNDLEACVIQGVGVTETPLMKEDSILAVRKYFQRITLYLKEKKYSPCAWEVVRAEIMRSFSLSTNLQESLRSKE

SEQ ID NO: 47 - protein, 165 aa, synthetic construct [sequence omitted]

SEQ ID NO: 48 - protein, 166 aa, synthetic construct
  REGION 1..166: note = Artificial polymer
MSYNLLGFLQRSSNFQCQKLLWQLNGRLEYCLKDRMNFDIPEEIKQLQQFQKEDAALTIYEMLQNIFAIFRQDSSSTGWNETIVENLLANVYHQINHLKTVLEEKLEKEDFTRGKLMSSLHLKRYYGRILHYLKAKEYSHCAWTIVRVEILRNFYFINRLTGYLRN

SEQ ID NO: 49 - protein, 167 aa, synthetic construct
  REGION 1..167: note = Artificial polymer
MCDLPQTHSLGNRRALILLAQMRRISPFSCLKDRHDFGFPQEEFDGNQFQKAQAISVLHEMIQQTFNLFSTKDSSAAWDESLLEKFYTELYQQLNDLEACVIQEVGVEETPLMNVDSILAVKKYFQRITLYLTEKKYSPCAWEVVRAEIMRSFSLSTNLQERLRRKE

SEQ ID NO: 50 - protein, 166 aa, synthetic construct
  REGION 1..166: note = Artificial polymer
CDLPQTHSLGNRRALILLAQMRRISPFSCLKDRHDFGFPQEEFDGNQFQKAQAISVLHEMIQQTFNLFSTKDSSAAWDESLLEKFYTELYQQLNDLEACVIQEVGVEETPLMNVDSILAVKKYFQRITLYLTEKKYSPCAWEVVRAEIMRSFSLSTNLQERLRRKE

SEQ ID NO: 51 - protein, 166 aa, synthetic construct
  REGION 1..166: note = Artificial polymer
CDLPQTHSLGNRRTLMLLAQMRRISPFSCLKDRHDFGFPQEEFDGNQFQKAQAISVLHEMIQQTFNLFSTKDSSAAWDESLLEKFYTELYQQLNDLEACVIQEVGVEETPLMNVDSILAVKKYFQRITLYLTEKKYSPCAWEVVRAEIMRSFSLSTNLQERLRRKE

SEQ ID NO: 52 - protein, 166 aa, synthetic construct
  REGION 1..166: note = Artificial polymer
CDLPQTHSLGNRRALILLAQMRRISPFSCLKDRHDFGFPQEEFDGNQFQKAQAISVLHEMIQQTFNLFSTKDSSAAWDESLLEKFYTELYQQLNDLEACVIQEVGVEETPLMNEDSILAVRKYFQRITLYLTEKKYSPCAWEVVRAEIMRSFSLSTNLQERLRRKE

SEQ ID NO: 53 - protein, 167 aa, synthetic construct
  REGION 1..167: note = Artificial polymer
MCDLPQTHSLGNRRALILLAQMRRISPFSCLKDRHDFGFPQEEFDGNQFQKAQAISVLHEMIQQTFNLFSTKDSSAAWDESLLEKFYTELYQQLNDLEACVIQEVGVEETPLMNEDSILAVRKYFQRITLYLTEKKYSPCAWEVVRAEIMRSFSLSTNLQERLRRKE

SEQ ID NO: 54 - protein, 167 aa, synthetic construct
  REGION 1..167: note = Artificial polymer
MCDLPQTHSLGNRRALILLAQMRRISPFSCLKDRHDFGFPQEEFDGNQFQKAQAISVLHEMIQQTFNLFSTKDSSAAWDESLLEKFYTELYQQLNDLEACVIQEVGVEETPLMNEDSILAVRKYFQRITLYLTEKKYSPCAWEVVRAEIMRSFSLCTNLQERLRRKE

SEQ ID NO: 55 - protein, 165 aa, synthetic construct
  REGION 1..165: note = Artificial polymer
APMAEGGGQNHHEVVKFMDVYQRSYCHPIETLVDIFQEYPDEIEYIFKPSCVPLMRCGGCCNDEGLECVPTEESNITMQIMRIKPHQGQHIGEMSFLQHNKCECRPKKDRARQENPCGPCSERRKHLFVQDPQTCKCSCKNTDSRCKARQLELNERTCRCDKPRR

SEQ ID NO: 56 - protein, 165 aa, synthetic construct
  REGION 1..165: note = Artificial polymer
APMAEGGGQNHHEVVKFMDVYQRSYCHPIETLVDIFQEYPDEIEYIFKPSCVPLMRCGGCCNDEGLECVPTEESNITMQIMRIKPHQGQHIGEMSFLQHNKCECRPKKDRARQENPCGPCSERRKHLFVQDPQTCKCSCKNTDSRCKARQLELNERTCRSLTRKD

SEQ ID NO: 57 - protein, 157 aa, synthetic construct [sequence omitted]

SEQ ID NO: 58 - protein, 171 aa, synthetic construct
  REGION 1..171: note = Artificial polymer
LPGVGLTPSAAQTARQHPKMHLAHSNLKPAAHLIGDPSKQNSLLWRANTDRAFLQDGFSLSNNSLLVPTSGIYFVYSQVVFSGKAYSPKATSSPLYLAHEVQLFSSQYPFHVPLLSSQKMVYPGLQEPWLHSMYHGAAFQLTQGDQLSTHTDGIPHLVLSPSTVFFGAFAL

SEQ ID NO: 59 - protein, 281 aa, synthetic construct [sequence omitted]

SEQ ID NO: 60 - protein, 153 aa, synthetic construct
  REGION 1..153: note = Artificial polymer
APVRSLNCTLRDSQQKSLVMSGPYELKALHLQGQDMEQQVVFSMSFVQGEESNDKIPVALGLKEKNLYLSCVLKDDKPTLQLESVDPKNYPKKKMEKRFVFNKIEINNKLEFESAQFPNWYISTSQAENMPVFLGGTKGGQDITDFTMQFVSS

SEQ ID NO: 61 - protein, 133 aa, synthetic construct [sequence omitted]

SEQ ID NO: 62 - protein, 129 aa, synthetic construct [sequence omitted]

SEQ ID NO: 63 - protein, 185 aa, synthetic construct
  REGION 1..185: note = Artificial polymer
APVPPGEDSKDVAAPHRQPLTSSERIDKQIRYILDGISALRKETCNKSNMCESSKEALAENNLNLPKMAEKDGCFQSGFNEETCLVKIITGLLEFEVYLEYLQNRFESSEEQARAVQMSTKVLIQFLQKKAKNLDAITTPDPTTNASLTTKLQAQNQWLQDMTTHLILRSFKEFLQSSLRALRQM

SEQ ID NO: 64 - protein, 114 aa, synthetic construct
  REGION 1..114: note = Artificial polymer
SPGPVPPSTALRELIEELVNITQNQKAPLCNGSMVWSINLTAGMYCAALESLINVSGCSAIEKTQRMLSGFCPHKVSAGQFSSLHVRDTKIEVAQFVKDLLLHLKKLFREGRFN

SEQ ID NO: 65 - protein, 194 aa, synthetic construct
  REGION 1..194: note = Artificial polymer
MAAEPVEDNCINFVAMKFIDNTLYFIAEDDENLESDYFGKLESKLSVIRNLNDQVLFIDQGNRPLFEDMTDSDCRDNAPRTIFIISMYKDSQPRGMAVTISVKCEKISTLSCENKIISFKEMNPPDNIKDTKSDIIFFQRSVPGHDNKMQFESSSYEGYFLACEKERDLFKLILKKEDELGDRSIMFTVQNEDL

SEQ ID NO: 66 - protein, 270 aa, synthetic construct
  REGION 1..270: note = Artificial polymer
MKPKMKYSTNKISTAKWKNTASKALCFKLGKSQQKAKEVCPMYFMKLRSGLMIKKEACYFRRETTKRPSLKTGRKHKRHLVLAACQQQSTVECFAFGISGVQKYTRALHDSSITGISPITEYLASLSTYNDQSITFALEDESYEIYVEDLKKDEKKDKVLLSYYESQHPSNESGDGVDGKMLMVTLSPTKDFWLHANNKEHSVELHKCEKPLPDQAFFVLHNMHSNCVSFECKTDPGVFIGVKDNHLALIKVDSSENLCTENILFKLSET

SEQ ID NO: 67 - protein, 193 aa, synthetic construct
  REGION 1..193: note = Artificial polymer
MGVHECPAWLWLLLSLLSLPLGLPVLGAPPRLICDSRVLERYLLEAKEAENITTGCAEHCSLNENITVPDTKVNFYAWKRMEVGQQAVEVWQGLALLSEAVLRGQALLVNSSQPWEPLQLHVDKAVSGLRSLTTLLRALGAQKEAISPPDAASAAPLRTITADTFRKLFRVYSNFLRGKLKLYTGEACRTGDR

SEQ ID NO: 68 - protein, 166 aa, synthetic construct
  REGION 1..166: note = Artificial polymer
APPRLICDSRVLERYLLEAKEAENITTGCAEHCSLNENITVPDTKVNFYAWKRMEVGQQAVEVWQGLALLSEAVLRGQALLVNSSQPWEPLQLHVDKAVSGLRSLTTLLRALGAQKEAISPPDAASAAPLRTITADTFRKLFRVYSNFLRGKLKLYTGEACRTGDR

SEQ ID NO: 69 - protein, 447 aa, synthetic construct
  REGION 1..447: note = Artificial polymer
QVQLVQSGVEVKKPGASVKVSCKASGYTFTNYYMYWVRQAPGQGLEWMGGINPSNGGTNFNEKFKNRVTLTTDSSTTTAYMELKSLQFDDTAVYYCARRDYRFDMGFDYWGQGTTVTVSSASTKGPSVFPLAPCSRSTSESTAALGCLVKDYFPEPVTVSWNSGALTSGVHTFPAVLQSSGLYSLSSVVTVPSSSLGTKTYTCNVDHKPSNTKVDKRVESKYGPPCPPCPAPEFLGGPSVFLFPPKPKDTLMISRTPEVTCVVVDVSQEDPEVQFNWYVDGVEVHNAKTKPREEQFNSTYRVVSVLTVLHQDWLNGKEYKCKVSNKGLPSSIEKTISKAKGQPREPQVYTLPPSQEEMTKNQVSLTCLVKGFYPSDIAVEWESNGQPENNYKTTPPVLDSDGSFFLYSRLTVDKSRWQEGNVFSCSVMHEALHNHYTQKSLSLSLGK

SEQ ID NO: 70 - protein, 218 aa, synthetic construct
  REGION 1..218: note = Artificial polymer
EIVLTQSPATLSLSPGERATLSCRASKGVSTSGYSYLHWYQQKPGQAPRLLIYLASYLESGVPARFSGSGSGTDFTLTISSLEPEDFAVYYCQHSRDLPLTFGGGTKVEIKRTVAAPSVFIFPPSDEQLKSGTASVVCLLNNFYPREAKVQWKVDNALQSGNSQESVTEQDSKDSTYSLSSTLTLSKADYEKHKVYACEVTHQGLSSPVTKSFNRGEC

SEQ ID NO: 71 - protein, 440 aa, synthetic construct
  REGION 1..440: note = Artificial polymer
QVQLVESGGGVVQPGRSLRLDCKASGITFSNSGMHWVRQAPGKGLEWVAVIWYDGSKRYYADSVKGRFTISRDNSKNTLFLQMNSLRAEDTAVYYCATNDDYWGQGTLVTVSSASTKGPSVFPLAPCSRSTSESTAALGCLVKDYFPEPVTVSWNSGALTSGVHTFPAVLQSSGLYSLSSVVTVPSSSLGTKTYTCNVDHKPSNTKVDKRVESKYGPPCPPCPAPEFLGGPSVFLFPPKPKDTLMISRTPEVTCVVVDVSQEDPEVQFNWYVDGVEVHNAKTKPREEQFNSTYRVVSVLTVLHQDWLNGKEYKCKVSNKGLPSSIEKTISKAKGQPREPQVYTLPPSQEEMTKNQVSLTCLVKGFYPSDIAVEWESNGQPENNYKTTPPVLDSDGSFFLYSRLTVDKSRWQEGNVFSCSVMHEALHNHYTQKSLSLSLGK

SEQ ID NO: 72 - protein, 214 aa, synthetic construct
  REGION 1..214: note = Artificial polymer
EIVLTQSPATLSLSPGERATLSCRASQSVSSYLAWYQQKPGQAPRLLIYDASNRATGIPARFSGSGSGTDFTLTISSLEPEDFAVYYCQQSSNWPRTFGQGTKVEIKRTVAAPSVFIFPPSDEQLKSGTASVVCLLNNFYPREAKVQWKVDNALQSGNSQESVTEQDSKDSTYSLSSTLTLSKADYEKHKVYACEVTHQGLSSPVTKSFNRGEC

SEQ ID NO: 73 - protein, 106 aa, synthetic construct
  REGION 1..106: note = Artificial polymer
EIVLTQSPSSLSASVGDRVTITCSARSSVSYMHWYQQKPGKAPKLLIYRTSNLASGVPSRFSGSGSGTDFTLTINSLQPEDFATYYCQQRSSFPLTFGGGTKLEIK

SEQ ID NO: 74 - protein, 106 aa, synthetic construct
  REGION 1..106: note = Artificial polymer
EIVLTQSPSSLSASVGDRVTITCSARSSVSYMHWFQQKPGKAPKLWIYRTSNLASGVPSRFSGSGSGTDYTLTINSLQPEDFATYYCQQRSSFPLTFGGGTKLEIK

SEQ ID NO: 75 - protein, 106 aa, synthetic construct
  REGION 1..106: note = Artificial polymer
EIVLTQSPSSLSASVGDRVTITCSARSSVSYMHWFQQKPGKAPKLWIYRTSNLASGVPSRFSGSGSGTDYCLTINSLQPEDFATYYCQQRSSFPLTFGGGTKLEIK

SEQ ID NO: 76 - protein, 106 aa, synthetic construct
  REGION 1..106: note = Artificial polymer
EIVLTQSPSSLSASVGDRVTITCSARSSVSYMHWFQQKPGKAPKLWIYRTSNLASGVPSRFSGSGSGTSYCLTINSLQPEDFATYYCQQRSSFPLTFGGGTKLEIK

SEQ ID NO: 77 - protein, 117 aa, synthetic construct
  REGION 1..117: note = Artificial polymer
QVQLVQSGSELKKPGASVKISCKASGYSFSNYGMNWVRQAPGQGLQWMGWINTDSGESTYAEEFKGRFVFSLDTSVSTAYLQITSLTAEDTGMYFCAKVGYDALDYWGQGTLVTVSS

SEQ ID NO: 78 - protein, 117 aa, synthetic construct
  REGION 1..117: note = Artificial polymer
QVQLVQSGSELKKPGASVKISCKASGYTFTNYGMNWVRQAPGQGLQWMGWINTDSGESTYAEEFKGRFVFSLDTSVSTAYLQITSLTAEDTGMYFCAKVGYDALDYWGQGTLVTVSS

SEQ ID NO: 79 - protein, 117 aa, synthetic construct
  REGION 1..117: note = Artificial polymer
QVQLVQSGSELKKPGASVKISCKASGYTFTNYGMNWVRQAPGQGLQWMGWINTDSGESTYAEEFKGRFVFSLDTSVNTAYLQITSLTAEDTGMYFCVRVGYDALDYWGQGTLVTVSS

SEQ ID NO: 80 - protein, 117 aa, synthetic construct
  REGION 1..117: note = Artificial polymer
QIQLVQSGSELKKPGASVKISCKASGYTFTNYGMNWVRQAPGQGLQWMGWINTDSGESTYAEEFKGRFVFSLDTSVNTAYLQITSLTAEDTGMYFCVRVGYDALDYWGQGTLVTVSS

SEQ ID NO: 81 - protein, 117 aa, synthetic construct
  REGION 1..117: note = Artificial polymer
QIQLVQSGSELKKPGASVKISCKASGYTFTNYGMNWVKQAPGQGLKWMGWINTDSGESTYAEEFKGRFAFSLDTSVNTAYLQITSLNAEDTGMYFCVRVGYDALDYWGQGTLVTVSS

SEQ ID NO: 82 - protein, 254 aa, synthetic construct
  REGION 1..254: note = Artificial polymer
LFTVTVPKELYIIEHGSNVTLECNFDTGSHVNLGAITASLQKVENDTSPHRERATLLEEQLPLGKASFHIPQVQVRDEGQYQCIIIYGVAWDYKYLTLKVKASYRKINTHILKVPETDEVELTCQATGYPLAEVSWPNVSVPANTSHSRTPEGLYQVTSVLRLKPPPGRNFSCVFWNTHVRELTLASIDLQSQMEPRTHPTWLLHIFIPFCIIAFIFIATVIALRKQLCQKLYSSKDTTKRPVTTTKREVNSAI

SEQ ID NO: 83 - protein, 453 aa, synthetic construct
  REGION 1..453: note = Artificial polymer
MIFLLLMLSLELQLHQIAALFTVTVPKELYIIEHGSNVTLECNFDTGSHVNLGAITASLQKVENDTSPHRERATLLEEQLPLGKASFHIPQVQVRDEGQYQCIIIYGVAWDYKYLTLKVKASYRKINTHILKVPETDEVELTCQATGYPLAEVSWPNVSVPANTSHSRTPEGLYQVTSVLRLKPPPGRNFSCVFWNTHVRELTLASIDLQSQMEPRTHPTWEPKSCDKTHTCPPCPAPELLGGPSVFLFPPKPKDTLMISRTPEVTCVVVDVSHEDPEVKFNWYVDGVEVHNAKTKPREEQYNSTYRVVSVLTVLHQDWLNGKEYKCKVSNKALPAPIEKTISKAKGQPREPQVYTLPPSRDELTKNQVSLTCLVKGFYPSDIAVEWESNGQPENNYKTTPPVLDSDGSFFLYSKLTVDKSRWQQGNVFSCSVMHEALHNHYTQKSLSLSPGK

SEQ ID NO: 84 - protein, 22 aa, synthetic construct
  REGION 1..22: note = Artificial polymer
SNTSESFKFRVTQLAPKAQIKE

SEQ ID NO: 85 - protein, 119 aa, synthetic construct
  REGION 1..119: note = Artificial polymer
EVQLQQSGPVLVKPGASVKMSCKASGYTFTDYYMNWVKQSHGKSLEWIGNINPYNGGTTYNQKFKGKATLTVDKSSRTAYMEINSLTSEDSAVYYCARGRIYDGSLDYWGQGTALTVSS

SEQ ID NO: 86 - protein, 106 aa, synthetic construct
  REGION 1..106: note = Artificial polymer
DIQMTQFPSSLCASQGGKVTVTCKASQDINNYMAWYQHKPGKGPRLLIHYTSTLLSGIPSRFSGSGSGRDYSFSISNLEPEDIATYYCLQYDNLWTFGGGTKLEIK

SEQ ID NO: 87 - protein, 116 aa, synthetic construct
  REGION 1..116: note = Artificial polymer
QVQLQQSGAELAKPGASVRLSCKASGYTFTNYWMHWVKQRPGQGLEWIGHINPSSGFTTYNQNFKDKATLTADKSSNTAYMQLSSLTYEDSAVYFCAREDYDVDYWGQGTTLTVSS

SEQ ID NO: 88 - protein, 107 aa, synthetic construct
  REGION 1..107: note = Artificial polymer
DIVMTQSQKFMSTSVGDRVSVTCKASQSVDTNVAWYQQKPGQSPKALIFSASYRYSGVPDRFTGSGSGTDFTLTINSVQSEDLAEYFCQQYNSYPYTFGSGTKLEIK

SEQ ID NO: 89 - protein, 122 aa, synthetic construct
  REGION 1..122: note = Artificial polymer
EVQLVESGGGLVKPGGSLKLSCAASGFTFSDYGMHWVRQAPEKGLEWVAYISSGSYTIYYTDTVKGRFTISRDNAKNTLFLQMTSLRSEDTAMYYCARRGYGSFYEYYFDYWGQGTTLTVSS

SEQ ID NO: 90 - protein, 106 aa, synthetic construct
  REGION 1..106: note = Artificial polymer
QIVLTQSPALMSASPGEKVTMTCSASSSVSYMYWYQQKPRSSPKPWIYLTSNLASGVPARFSGSGSGTSYSLTISSMEAEDAATYYCQQWSSNPFTFGSGTKLEIK

SEQ ID NO: 91 - protein, 119 aa, synthetic construct
  REGION 1..119: note = Artificial polymer
EVQLVESGGGLVQAGKSLRLSCAASGSIFSIHAMGWFRQAPGKEREFVAAITWSGGITYYEDSVKGRFTISRDNAKNTVYLQMNSLKPEDTAIYYCAADRAESSWYDYWGQGTQVTVSS

SEQ ID NO: 92 - protein, 119 aa, synthetic construct
  REGION 1..119: note = Artificial polymer
EVQLVESGGGLVQAGGSLRLSCAASGSIASIHAMGWFRQAPGKEREFVAVITWSGGITYYADSVKGRFTISRDNAKNTVYLQMNSLKPEDTAIYYCAGDKHQSSWYDYWGQGTQVTVSS

SEQ ID NO: 93 - protein, 119 aa, synthetic construct
  REGION 1..119: note = Artificial polymer
EVQLVESGGGLVQAGGSLRLSCAASGSISSIHAMGWFRQAPGKEREFVAAITWSGGITYYADSLKGRFTISRDNAKNTGYLQMNSLKPEDTAIYYCAADRAQSSWYDYWGQGTQVTVSS

SEQ ID NO: 94 - protein, 119 aa, synthetic construct
  REGION 1..119: note = Artificial polymer
EVQLVESGGGLVQAGGSLGLSCAASGSIFSINAMAWFRQAPGKEREFVALISWSGGSTYYEDSVKGRFTISRDNAKNTVYLQMNSLKPEDTAIYYCAADRVDSNWYDYWGQGTQVTVSS

SEQ ID NO: 95 - protein, 120 aa, synthetic construct
  REGION 1..120: note = Artificial polymer
EVQLVESGGGLVQAGGSLRLSCAASGRAFSSGTMGWFRRAPGKEREFVASIPWSGGRIYYADSVKGRFTISRDNAQNTVYLQMNSLKPEDTAVYYCAVKERSTGWDFASWGQCTQVTVSS

SEQ ID NO: 96 - protein, 121 aa, synthetic construct
  REGION 1..121: note = Artificial polymer
QVQLVQSGAELKQPGASVKMSCKASGYSFTSSWIHWVKQAPGQGLEWIGYIYPSTGFTEYNQKFKDRATLTADKSTSTAYMELSSLRSEDSAVYYCARWRDSSGYHAMDYWGQGTSVTVSS

SEQ ID NO: 97 - protein, 121 aa, synthetic construct
  REGION 1..121: note = Artificial polymer
QVQLVQSGAEVKQPGASVKMSCKASGYSFTSSWIHWVKQAPGQGLEWIGYIYPSTGFTEYNQKFKDRATLTADKSTSTAYMELSSLRSEDTAVYYCARWRDSSGYHAMDYWGQGTSVTVSS

SEQ ID NO: 98 - protein, 121 aa, synthetic construct
  REGION 1..121: note = Artificial polymer
QVQLVQSGHEVKQPGASVKMSCKASGYSFTSSWIHWVKQAPGQGLEWIGYIYPSTGFTEYNQKFKDRATLTADKSTSTAYMELSSLRSEDTAVYYCARWRDSSGYHAMDYWGQGTLVTVSS

SEQ ID NO: 99 - protein, 121 aa, synthetic construct
  REGION 1..121: note = Artificial polymer
QVQLVQSGHEVKQPGASVKMSCKASGYSFTSSWIHWVRQAPGQGLEWIGYIYPSTGFTEYNQKFKDRATLTADKSTSTAYMELSSLRSEDTAVYYCARWRDSSGYHAMDYWGQGTLVTVSS

SEQ ID NO: 100 - protein, 121 aa, synthetic construct
  REGION 1..121: note = Artificial polymer
QVQLVQSGHEVKQPGASVKVSCKASGYSFTSSWIHWVRQAPGQGLEWIGYIYPSTGFTEYNQKFKDRATITADKSTSTAYMELSSLRSEDTAVYYCARWRDSSGYHAMDYWGQGTLVTVSS

SEQ ID NO: 101 - protein, 111 aa, synthetic construct
  REGION 1..111: note = Artificial polymer
DIVLTQSPASLTLSPGQRLTISCRASQSVSTSGYSYMHWYQQKPDQSPKLLIKFGSNLESGIPARFSGSGSGTDFTLTISSLEEEDFATYYCQHSWEIPYTFGQGTKLEIK

SEQ ID NO: 102 - protein, 111 aa, synthetic construct
  REGION 1..111: note = Artificial polymer
DIVLTQSPATLSLSPGQRLTISCRASQSVSTSGYSYMHWYQQKPDQSPKLLIKFGSNLESGIPARFSGSGSGTDFTLTISSLEPEDFATYYCQHSWEIPYTFGQGTKLEIK

SEQ ID NO: 103 - protein, 111 aa, synthetic construct
  REGION 1..111: note = Artificial polymer
EIVLTQSPATLSLSPGQRLTISCRASQSVSTSGYSYMHWYQQKPDQSPKLLIKFGSNLESGIPARFSGSGSGTDFTLTISSLEPEDFATYYCQHSWEIPYTFGQGTKLEIK

SEQ ID NO: 104 - protein, 111 aa, synthetic construct
  REGION 1..111: note = Artificial polymer
DIVLTQSPATLSLSPGQRLTISCRASQSVSTSGYSYMHWYQQKPDQSPKLLIKFGSNLESGIPARFSGSGSGTDFTLTISSLEPEDFAVYYCQHSWEIPYTFGQGTKLEIK

SEQ ID NO: 105 - protein, 451 aa, synthetic construct
  REGION 1..451: note = Artificial polymer
EVQLVESGGGLVQPGGSLRLSCAASGFTFSRYWMSWVRQAPGKGLEWVANIKQDGSEKYYVDSVKGRFTISRDNAKNSLYLQMNSLRAEDTAVYYCAREGGWFGELAFDYWGQGTLVTVSSASTKGPSVFPLAPSSKSTSGGTAALGCLVKDYFPEPVTVSWNSGALTSGVHTFPAVLQSSGLYSLSSVVTVPSSSLGTQTYICNVNHKPSNTKVDKRVEPKSCDKTHTCPPCPAPEFEGGPSVFLFPPKPKDTLMISRTPEVTCVVVDVSHEDPEVKFNWYVDGVEVHNAKTKPREEQYNSTYRVVSVLTVLHQDWLNGKEYKCKVSNKALPASIEKTISKAKGQPREPQVYTLPPSREEMTKNQVSLTCLVKGFYPSDIAVEWESNGQPENNYKTTPPVLDSDGSFFLYSKLTVDKSRWQQGNVFSCSVMHEALHNHYTQKSLSLSPGK

SEQ ID NO: 106 - protein, 215 aa, synthetic construct
  REGION 1..215: note = Artificial polymer
EIVLTQSPGTLSLSPGERATLSCRASQRVSSSYLAWYQQKPGQAPRLLIYDASSRATGIPDRFSGSGSGTDFTLTISRLEPEDFAVYYCQQYGSLPWTFGQGTKVEIKRTVAAPSVFIFPPSDEQLKSGTASVVCLLNNFYPREAKVQWKVDNALQSGNSQESVTEQDSKDSTYSLSSTLTLSKADYEKHKVYACEVTHQGLSSPVTKSFNRGEC

SEQ ID NO: 107 - protein, 121 aa, synthetic construct
  REGION 1..121: note = Artificial polymer
EVQLVESGGGLVQPGGSLRLSCAASGFTFSRYWMSWVRQAPGKGLEWVANIKQDGSEKYYVDSVKGRFTISRDNAKNSLYLQMNSLRAEDTAVYYCAREGGWFGELAFDYWGQGTLVTVSS

SEQ ID NO: 108 - protein, 108 aa, synthetic construct
  REGION 1..108: note = Artificial polymer
EIVLTQSPGTLSLSPGERATLSCRASQRVSSSYLAWYQQKPGQAPRLLIYDASSRATGIPDRFSGSGSGTDFTLTISRLEPEDFAVYYCQQYGSLPWTFGQGTKVEIK

SEQ ID NO: 109 - protein, 448 aa, synthetic construct
  REGION 1..448: note = Artificial polymer
EVQLVESGGGLVQPGGSLRLSCAASGFTFSDSWIHWVRQAPGKGLEWVAWISPYGGSTYYADSVKGRFTISADTSKNTAYLQMNSLRAEDTAVYYCARRHWPGGFDYWGQGTLVTVSSASTKGPSVFPLAPSSKSTSGGTAALGCLVKDYFPEPVTVSWNSGALTSGVHTFPAVLQSSGLYSLSSVVTVPSSSLGTQTYICNVNHKPSNTKVDKKVEPKSCDKTHTCPPCPAPELLGGPSVFLFPPKPKDTLMISRTPEVTCVVVDVSHEDPEVKFNWYVDGVEVHNAKTKPREEQYASTYRVVSVLTVLHQDWLNGKEYKCKVSNKALPAPIEKTISKAKGQPREPQVYTLPPSREEMTKNQVSLTCLVKGFYPSDIAVEWESNGQPENNYKTTPPVLDSDGSFFLYSKLTVDKSRWQQGNVFSCSVMHEALHNHYTQKSLSLSPGK

SEQ ID NO: 110 - protein, 214 aa, synthetic construct
  REGION 1..214: note = Artificial polymer
DIQMTQSPSSLSASVGDRVTITCRASQDVSTAVAWYQQKPGKAPKLLIYSASFLYSGVPSRFSGSGSGTDFTLTISSLQPEDFATYYCQQYLYHPATFGQGTKVEIKRTVAAPSVFIFPPSDEQLKSGTASVVCLLNNFYPREAKVQWKVDNALQSGNSQESVTEQDSKDSTYSLSSTLTLSKADYEKHKVYACEVTHQGLSSPVTKSFNRGEC

SEQ ID NO: 111 - protein, 450 aa, synthetic construct
  REGION 1..450: note = Artificial polymer
EVQLLESGGGLVQPGGSLRLSCAASGFTFSSYIMMWVRQAPGKGLEWVSSIYPSGGITFYADTVKGRFTISRDNSKNTLYLQMNSLRAEDTAVYYCARIKLGTVTTVDYWGQGTLVTVSSASTKGPSVFPLAPSSKSTSGGTAALGCLVKDYFPEPVTVSWNSGALTSGVHTFPAVLQSSGLYSLSSVVTVPSSSLGTQTYICNVNHKPSNTKVDKKVEPKSCDKTHTCPPCPAPELLGGPSVFLFPPKPKDTLMISRTPEVTCVVVDVSHEDPEVKFNWYVDGVEVHNAKTKPREEQYNSTYRVVSVLTVLHQDWLNGKEYKCKVSNKALPAPIEKTISKAKGQPREPQVYTLPPSRDELTKNQVSLTCLVKGFYPSDIAVEWESNGQPENNYKTTPPVLDSDGSFFLYSKLTVDKSRWQQGNVFSCSVMHEALHNHYTQKSLSLSPGK

SEQ ID NO: 112 - protein, 216 aa, synthetic construct
  REGION 1..216: note = Artificial polymer
QSALTQPASVSGSPGQSITISCTGTSSDVGGYNYVSWYQQHPGKAPKLMIYDVSNRPSGVSNRFSGSKSGNTASLTISGLQAEDEADYYCSSYTSSSTRVFGTGTKVTVLGQPKANPTVTLFPPSSEELQANKATLVCLISDFYPGAVTVAWKADGSPVKAGVETTKPSKQSNNKYAASSYLSLTPEQWKSHRSYSCQVTHEGSTVEKTVAPTECS

SEQ ID NO: 113 - protein, 123 aa, synthetic construct
  REGION 1..123: note = Artificial polymer
QVQLVQSGAEVKKPGSSVKVSCKTSGDTFSTYAISWVRQAPGQGLEWMGGIIPIFGKAHYAQKFQGRVTITADESTSTAYMELSSLRSEDTAVYFCARKFHFVSGSPFGMDVWGQGTTVTVSS

SEQ ID NO: 114 - protein, 106 aa, synthetic construct
  REGION 1..106: note = Artificial polymer
EIVLTQSPATLSLSPGERATLSCRASQSVSSYLAWYQQKPGQAPRLLIYDASNRATGIPARFSGSGSGTDFTLTISSLEPEDFAVYYCQQRSNWPTFGQGTKVEIK

SEQ ID NO: 115 - protein, 117 aa, synthetic construct
  REGION 1..117: note = Artificial polymer
QVQLVQSGAEVKKPGASVKVSCKASGYTFTDYGFSWVRQAPGQGLEWMGWITAYNGNTNYAQKLQGRVTMTTDTSTSTVYMELRSLRSDDTAVYYCARDYFYGMDVWGQGTTVTVSS

SEQ ID NO: 116 - protein, 107 aa, synthetic construct
  REGION 1..107: note = Artificial polymer
EIVLTQSPATLSLSPGERATLSCRASQSVSSYLVWYQQKPGQAPRLLIYDASNRATGIPARFSGSGSGTDFTLTISSLEPEDFAVYYCQQRSNWPRTFGQGTKVEIK

SEQ ID NO: 117 - protein, 118 aa, synthetic construct
  REGION 1..118: note = Artificial polymer
QVQLVQSGAEVKKPGASVKVSCKASGYTFTSYDVHWVRQAPGQRLEWMGWLHADTGITKFSQKFQGRVTITRDTSASTAYMELSSLRSEDTAVYYCARERIQLWFDYWGQGTLVTVSS

SEQ ID NO: 118 - protein, 107 aa, synthetic construct
  REGION 1..107: note = Artificial polymer
DIQMTQSPSSLSASVGDRVTITCRASQGISSWLAWYQQKPEKAPKSLIYAASSLQSGVPSRFSGSGSGTDFTLTISSLQPEDFATYYCQQYNSYPYTFGQGTKLEIK

SEQ ID NO: 119 - protein, 120 aa, synthetic construct
  REGION 1..120: note = Artificial polymer
QVQLVQSGAEVKKPGSSVKVSCKVSGGIFSTYAINWVRQAPGQGLEWMGGIIPIFGTANHAQKFQGRVTITADESTSTAYMELSSLRSEDTAVYYCARDQGIAAALFDYWGQGTLVTVSS

SEQ ID NO: 120 - protein, 108 aa, synthetic construct
  REGION 1..108: note = Artificial polymer
EIVLTQSPGTLSLSPGERATLSCRASQSVSSSYLAWYQQKPGQAPRLLIYGASSRATGIPDRFSGSGSGTDFTLTISRLEPEDFAVYYCQQYGSSPWTFGQGTKVEIK

SEQ ID NO: 121 - protein, 113 aa, synthetic construct
  REGION 1..113: note = Artificial polymer
EVQLVESGGGLVQPGRSLRLSCAVSGFTFDDYVVHWVRQAPGKGLEWVSGISGNSGNIGYADSVKGRFTISRDNAKNSLYLQMNSLRAEDTALYYCAVPFDYWGQGTLVTVSS

SEQ ID NO: 122 - protein, 107 aa, synthetic construct; identical to SEQ ID NO: 118
  REGION 1..107: note = Artificial polymer

SEQ ID NO: 123 - protein, 123 aa, synthetic construct
  REGION 1..123: note = Artificial polymer
QVQLVQSGAEVKKPGSSVKVSCKTSGDTFSSYAISWVRQAPGQGLEWMGGIIPIFGRAHYAQKFQGRVTITADESTSTAYMELSSLRSEDTAVYFCARKFHFVSGSPFGMDVWGQGTTVTVSS

SEQ ID NO: 124 - protein, 106 aa, synthetic construct; identical to SEQ ID NO: 114
  REGION 1..106: note = Artificial polymer

SEQ ID NO: 125 - protein, 123 aa, synthetic construct
  REGION 1..123: note = Artificial polymer
QVQLVQSGAEVKKPGSSVKVSCKTSGGTFSSYAISWVRQAPGQGLEWMGGIIPIFGKAHYAQKFQGRVTITADESTTTAYMELSSLRSEDTAVYYCARKYDYVSGSPFGMDVWGQGTTVTVSS

SEQ ID NO: 126 - protein, 106 aa, synthetic construct; identical to SEQ ID NO: 114
  REGION 1..106: note = Artificial polymer

SEQ ID NO: 127 - protein, 121 aa, synthetic construct
  REGION 1..121: note = Artificial polymer
QVQLVQSGAEVKKPGSSVKVSCKASGGTFSSYAINWVRQAPGQGLEWMGGIIPIFGSANYAQKFQDRVTITADESTSAAYMELSSLRSEDTAVYYCARDSSGWSRYYMDVWGQGTTVTVSS

SEQ ID NO: 128 - protein, 106 aa, synthetic construct
  REGION 1..106: note = Artificial polymer
EIVLTQSPGTLSLSPGERATLSCRASQSVSSSYLAWYQQKPGQAPRLLIYGASSRATGIPDRFSGSGSGTDFTLTISRLEPEDFAVYYCQQYGSSPFGGGTKVEIK

SEQ ID NO: 129 - protein, 123 aa, synthetic construct
  REGION 1..123: note = Artificial polymer
QVQLVQSGAEVKEPGSSVKVSCKASGGTFNSYAISWVRQAPGQGLEWMGGIIPLFGIAHYAQKFQGRVTITADESTNTAYMDLSSLRSEDTAVYYCARKYSYVSGSPFGMDVWGQGTTVTVSS

SEQ ID NO: 130 - protein, 106 aa, synthetic construct
  REGION 1..106: note = Artificial polymer
EIVLTQSPATLSLSPGERATLSCRASQSVSSYLAWYQQKPGQAPRLLIYDASNRATGIPARFSGSGSGTDFTLTISSLEPEDFAVYYCQQRSNWPTFGQGTRLEIK

SEQ ID NO: 131 - protein, 121 aa, synthetic construct
  REGION 1..121: note = Artificial polymer
EVQLVESGGGLVQPGRSLRLSCAASGITFDDYGMHWVRQAPGKGLEWVSGISWNRGRIEYADSVKGRFTISRDNAKNSLYLQMNSLRAEDTALYYCAKGRFRYFDWFLDYWGQGTLVTVSS

SEQ ID NO: 132 - protein, 107 aa, synthetic construct
  REGION 1..107: note = Artificial polymer
AIQLTQSPSSLSASVGDRVTITCRASQGISSALAWYQQKPGKAPKLLIYDASSLESGVPSRFSGSGSGTDFTLTISSLQPEDFATYYCQQFNSYPFTFGPGTKVDIK

SEQ ID NO: 133 - protein, 118 aa, synthetic construct
  REGION 1..118: note = Artificial polymer
EVKLQESGPSLVKPSQTLSLTCSVTGYSITSDYWNWIRKFPGNKLEYVGYISYTGSTYYNPSLKSRISITRDTSKNQYYLQLNSVTSEDTATYYCARYGGWLSPFDYWGQGTTLTVSS

SEQ ID NO: 134 - protein, 107 aa, synthetic construct
  REGION 1..107: note = Artificial polymer
DIVMTQSHKLMSTSVGDRVSITCKASQDVGTAVAWYQQKPGQSPKLLIYWASTRHTGVPDRFTGSGSGTDFTLTISNVQSEDLADYFCQQDSSYPLTFGAGTKVELK

SEQ ID NO: 135 - protein, 120 aa, synthetic construct
  REGION 1..120: note = Artificial polymer
EVQLQESGPGLVAPSQSLSITCTVSGFSLTTYSINWIRQPPGKGLEWLGVMWAGGGTNSNSVLKSRLIISKDNSKSQVFLKMNSLQTDDTARYYCARYYGNSPYYAIDYWGQGTSVTVSS

SEQ ID NO: 136 - protein, 107 aa, synthetic construct
  REGION 1..107: note = Artificial polymer
DIVTTQSHKLMSTSVGDRVSITCKASQDVGTAVAWYQQKPGQSPKLLIYWASTRHTGVPDRFTGSGSGTDFTLTISNVQSEDLADYFCQQDSSYPLTFGAGTKVELK

SEQ ID NO: 137 - protein, 118 aa, synthetic construct
  REGION 1..118: note = Artificial polymer
EVKLQESGPSLVKPSQTLSLTCSVTGYSIISDYWNWIRKFPGNKLEYLGYISYTGSTYYNPSLKSRISITRDTSKNQYYLQLNSVTTEDTATYYCARRGGWLLPFDYWGQGTTLTVSS

SEQ ID NO: 138 - protein, 113 aa, synthetic construct
  REGION 1..113: note = Artificial polymer
DIVMTQSPSSLAVSVGEKVSMGCKSSQSLLYSSNQKNSLAWYQQKPGQSPKLLIDWASTRESGVPDRFTGSGSGTDFTLTISSVKAEDLAVYYCQQYYGYPLTFGAGTKLELK

SEQ ID NO: 139 - protein, 118 aa, synthetic construct
  REGION 1..118: note = Artificial polymer
EVKLQESGPSLVKPGASVKLSCKASGYTFTSYDINWVKQRPGQGLEWIGWIFPRDNNTKYNENFKGKATLTVDTSSTTAYMELHSLTSEDSAVYFCTKENWVGDFDYWGQGTTLTLSS

SEQ ID NO: 140 - protein, 106 aa, synthetic construct
  REGION 1..106: note = Artificial polymer
DIVMTQSPAIMSASPGEKVTMTCSASSSIRYMHWYQQKPGTSPKRWISDTSKLTSGVPARFSGSGSGTSYALTISSMEAEDAATYYCHQRSSYPWTFGGGTKLEIK

SEQ ID NO: 141 - protein, 114 aa, synthetic construct
  REGION 1..114: note = Artificial polymer
EVQLQQSGPDLVTPGASVRISCQASGYTFPDYYMNWVKQSHGKSLEWIGDIDPNYGGTTYNQKFKGKAILTVDRSSSTAYMELRSLTSEDSAVYYCARGALTDWGQGTSLTVSS

SEQ ID NO: 142 - protein, 106 aa, synthetic construct
  REGION 1..106: note = Artificial polymer
QIVLSQSPAILSASPGEKVTMTCRASSSVSYIYWFQQKPGSSPKPWIYATFNLASGVPARFSGSGSGTSYSLTISRVETEDAATYYCQQWSNNPLTFGAGTKLELK

SEQ ID NO: 143 - protein, 115 aa, synthetic construct
  REGION 1..115: note = Artificial polymer
EVQLVQSGPELKKPGASVKMSCKASGYTFTSYVMHWVKQAPGQRLEWIGYVNPFNDGTKYNEMFKGRATLTSDKSTSTAYMELSSLRSEDSAVYYCARQAWGYPWGQGTLVTVSS

SEQ ID NO: 144 - protein, 115 aa, synthetic construct
  REGION 1..115: note = Artificial polymer
EVQLVQSGAEVKKPGASVKMSCKASGYTFTSYVMHWVKQAPGQRLEWIGYVNPFNDGTKYNEMFKGRATLTSDKSTSTAYMELSSLRSEDTAVYYCARQAWGYPWGQGTLVTVSS

SEQ ID NO: 145 - protein, 115 aa, synthetic construct
  REGION 1..115: note = Artificial polymer
EVQLVQSGAEVKKPGASVKMSCKASGYTFTSYVMHWVRQAPGQRLEWIGYVNPFNDGTKYNEMFKGRATLTSDKSTSTAYMELSSLRSEDTAVYYCARQAWGYPWGQGTLVTVSS

SEQ ID NO: 146 - protein, 115 aa, synthetic construct
  REGION 1..115: note = Artificial polymer
EVQLVQSGAEVKKPGASVKVSCKASGYTFTSYVMHWVRQAPGQRLEWIGYVNPFNDGTKYNEMFKGRATLTSDKSTSTAYMELSSLRSEDTAVYYCARQAWGYPWGQGTLVTVSS

SEQ ID NO: 147 - protein, 115 aa, synthetic construct
  REGION 1..115: note = Artificial polymer
EVQLVQSGAEVKKPGASVKVSCKASGYTFTSYVMHWVRQAPGQRLEWIGYVNPFNDGTKYNEMFKGRATITSDKSTSTAYMELSSLRSEDTAVYYCARQAWGYPWGQGTLVTVSS

SEQ ID NO: 148 - protein, 111 aa, synthetic construct
  REGION 1..111: note = Artificial polymer
DIVLTQSPASLALSPGERATLSCRATESVEYYGTSLVQWYQQKPGQPPKLLIYAASSVDSGVPSRFSGSGSGTDFTLTINSLEEEDAAMYFCQQSRRVPYTFGQGTKLEIK

SEQ ID NO: 149 - protein, 111 aa, synthetic construct
  REGION 1..111: note = Artificial polymer
DIVLTQSPATLSLSPGERATLSCRATESVEYYGTSLVQWYQQKPGQPPKLLIYAASSVDSGVPSRFSGSGSGTDFTLTINSLEAEDAAMYFCQQSRRVPYTFGQGTKLEIK

SEQ ID NO: 150 - protein, 111 aa, synthetic construct
  REGION 1..111: note = Artificial polymer
EIVLTQSPATLSLSPGERATLSCRATESVEYYGTSLVQWYQQKPGQPPKLLIYAASSVDSGVPSRFSGSGSGTDFTLTINSLEAEDAAMYFCQQSRRVPYTFGQGTKLEIK

SEQ ID NO: 151 - protein, 111 aa, synthetic construct
  REGION 1..111: note = Artificial polymer
DIVLTQSPATLSLSPGERATLSCRATESVEYYGTSLVQWYQQKPGQPPKLLIYAASSVDSGVPSRFSGSGSGTDFTLTINSLEAEDAATYFCQQSRRVPYTFGQGTKLEIK

SEQ ID NO: 152 - protein, 120 aa, synthetic construct
  REGION 1..120: note = Artificial polymer
EVQLVESGGGLVKPGGSLRLSCAASGFTFSTYSMNWVRQAPGKGLEWVSSISSSGDYIYYADSVKGRFTISRDNAKNSLFLQMNSLKAEDTAVYYCARDLVTSMVAFDYWGQGTLVTVSS

SEQ ID NO: 153 - protein, 108 aa, synthetic construct
  REGION 1..108: note = Artificial polymer
SYELTQPPSVSVSPGQAARITCSGDALPQKYVFWYQQKSGQAPVLVIYEDSKRPSGIPERFSGSSSGTMATLTISGAQVEDEADYYCYSTDRSGNHRVFGGGTRLTVL

SEQ ID NO: 154 - protein, 120 aa, synthetic construct
  REGION 1..120: note = Artificial polymer
EVQLVESGGGLVQPGGSLRLSCAASGFTFSSYWMSWVRQAPGKGLEWVANIKQDGGEQYYVDSVKGRFTISRDNAKNSLYLQMNSLRAEDTAVYYCARDWNYGYYDMDVWGQGTTVTVSS

SEQ ID NO: 155 - protein, 108 aa, synthetic construct
  REGION 1..108: note = Artificial polymer
EIVLTQSPGTLSLSPGERATLSCRASQSVSSNYLAWFQQKPGQAPRLLIFGTSSRATGIPDRFSGSGSGTDFTLTISRLEPEDFAVYYCQQYGSSIFTFGPGTKVDIK

SEQ ID NO: 156 - protein, 121 aa, synthetic construct; identical to SEQ ID NO: 107
  REGION 1..121: note = Artificial polymer

SEQ ID NO: 157 - protein, 108 aa, synthetic construct
  REGION 1..108: note = Artificial polymer
EIVLTQSPGTLSLSPGERATLSCRASQRVSSSYLAWYQQKPGQAPRLLIYDASSRATGIPDRFSGSGSGTDFTLTISRLEPEDFAVYYCQQYGSLPWTFGQGTEVEIK

SEQ ID NO: 158 - protein, 121 aa, synthetic construct
  REGION 1..121: note = Artificial polymer
EVQLLESGGGLVQPGGSLRLSCAASGFTFSNYAMSWVRQAPGKGLEWVSAIRGSGGSTYYADSVKGRFTISRDNSKNTLYLQMNSLRAEDTAVYYCAKDLHYDSSGYLDYWGQGTLVTVSS

SEQ ID NO: 159 - protein, 107 aa, synthetic construct
  REGION 1..107: note = Artificial polymer
DIQMTQSPSSVSASVGDRVTITCRASQGIRSWLAWYQQKPGKAPKLLIYAISRLQSGVPSRFSGSGSGTDFTLTISSLQPEDFATYYCQQANSFPLTFGGGTKVEIK

SEQ ID NO: 160 - protein, 119 aa, synthetic construct
  REGION 1..119: note = Artificial polymer
EVQLVESGGGLVQPGGSLRLSCAASGFTFSSYWMSWVRQAPGKGLEWVANIKQDGGEKYYVDSVKGRFTISRDNAKNSLFLQMNSLRAEDTAVYYCARVQLYSDYFDYWGQGTLVTVSS

SEQ ID NO: 161 - protein, 107 aa, synthetic construct
  REGION 1..107: note = Artificial polymer
DIQMTQSPSSVSASVGDRVTITCRASQGISSWLAWYQQKSGKAPKLLIYAASGLQSGVPSRFSGSGSGTDFTLTISSLQPEDLATYYCQQSHSLPPTFGQGTKVEIK

SEQ ID NO: 162 - protein, 121 aa, synthetic construct
  REGION 1..121: note = Artificial polymer
EVQLLESGGDLVQPGGSLRLSCAASGFTFNSYAMSWVRQAPGKGLEWVSTISGSGGFTFSADSVKGRFTISRDNSKNTLFLQMNSLRVEDSAVYSCAKVLVGFNNGCWDYWGQGTLVTVSS

SEQ ID NO: 163 - protein, 108 aa, synthetic construct
  REGION 1..108: note = Artificial polymer
SYVLTQPPSVSVAPGQTARITCGGNNIGSKSVHWYQQKPGQAPVLVVYDDSDRPSGIPERFSGSNSGNTATLTISRVEAGDEADYYCQVWDSSNDHVVFGGGTKLTVL

SEQ ID NO: 164 - protein, 120 aa, synthetic construct
  REGION 1..120: note = Artificial polymer
EVQLVESGGGLVKPGGSLRLSCAASGFTFSTYSMNWVRQAPGKGLEWVSSISSSGDYIYYADSVKGRFTISRDNAKNSLYLQMNSLRAEDTAVYYCARDLVTSMVAFDYWGQGTLVTVSS

SEQ ID NO: 165 - protein, 108 aa, synthetic construct
  REGION 1..108: note = Artificial polymer
SYELTQPPSVSVSPGQTARITCSGDALPQKYVFWYQQKSGQAPVLVIYEDSKRPSGIPERFSGSSSGTMATLTISGAQVEDEADYYCYSTDRSGNHRVFGGGTKLTVL

SEQ ID NO: 166 - protein, 121 aa, synthetic construct; identical to SEQ ID NO: 107
  REGION 1..121: note = Artificial polymer

SEQ ID NO: 167 - protein, 108 aa, synthetic construct; identical to SEQ ID NO: 108
  REGION 1..108: note = Artificial polymer

SEQ ID NO: 168 - protein, 120 aa, synthetic construct
  REGION 1..120: note = Artificial polymer
QVQLVQSGAEVKKPGASVKVSCKASGYTFTSYWMYWVRQATGQGLEWMGRIDPNSGSTKYNEKFKNRFTISRDDSKNTAYLQMNSLKTEDTAVYYCARDYRKGLYAMDYWGQGTTVTVSS

SEQ ID NO: 169 - protein, 120 aa, synthetic construct
  REGION 1..120: note = Artificial polymer
EVQLVQSGAEVKKPGATVKISCKVSGYTFTSYWMYWVRQATGQGLEWMGRIDPNSGSTKYNEKFKNRVTITADKSTSTAYMELSSLRSEDTAVYYCARDYRKGLYAMDYWGQGTTVTVSS

SEQ ID NO: 170 - protein, 120 aa, synthetic construct
  REGION 1..120: note = Artificial polymer
EVQLVQSGAEVKKPGESLRISCKGSGYTFTSYWMYWVRQAPGQGLEWMGRIDPNSGSTKYNEKFKNRVTISVDTSKNQFSLKLSSVTAADTAVYYCARDYRKGLYAMDYWGQGTTVTVSS

SEQ ID NO: 171 - protein, 120 aa, synthetic construct
  REGION 1..120: note = Artificial polymer
EVQLVQSGAEVKKPGATVKISCKVSGYTFTSYWMYWIRQSPSRGLEWLGRIDPNSGSTKYNEKFKNRLTISKDTSKNQVVLTMTNMDPVDTATYYCARDYRKGLYAMDYWGQGTTVTVSS

SEQ ID NO: 172 - protein, 120 aa, synthetic construct
  REGION 1..120: note = Artificial polymer
EVQLVQSGAEVKKPGESLRISCKGSGYTFTSYWMYWIRQPPGKGLEWIGRIDPNSGSTKYNEKFKNRVTITADKSTSTAYMELSSLRSEDTAVYYCARDYRKGLYAMDYWGQGTTVTVSS

SEQ ID NO: 173 - protein, 120 aa, synthetic construct
  REGION 1..120: note = Artificial polymer
QVQLVQSGAEVKKPGASVKVSCKASGYTFTSYWMYWIRQSPSRGLEWLGRIDPNSGSTKYNEKFKNRFTISRDDSKNTAYLQMNSLKTEDTAVYYCARDYRKGLYAMDYWGQGTTVTVSS

SEQ ID NO: 174 - protein, 120 aa, synthetic construct
  REGION 1..120: note = Artificial polymer
EVQLVQSGAEVKKPGESLRISCKGSGYTFTSYWMYWVRQARGQRLEWIGRIDPNSGSTKYNEKFKNRLTISKDTSKNQVVLTMTNMDPVDTATYYCARDYRKGLYAMDYWGQGTTVTVSS

SEQ ID NO: 175 - protein, 120 aa, synthetic construct
  REGION 1..120: note = Artificial polymer
QITLKESGPTLVKPTQTLTLTCTFSGYTFTSYWMYWVRQAPGKGLEWVSRIDPNSGSTKYNEKFKNRVTITADKSTSTAYMELSSLRSEDTAVYYCARDYRKGLYAMDYWGQGTTVTVSS

SEQ ID NO: 176 - protein, 120 aa, synthetic construct
  REGION 1..120: note = Artificial polymer
EVQLVQSGAEVKKPGATVKISCKVSGYTFTSYWMYWVRQARGQRLEWIGRIDPNSGSTKYNEKFKNRFTISRDNSKNTLYLQMNSLRAEDTAVYYCARDYRKGLYAMDYWGQGTTVTVSS

SEQ ID NO: 177 - protein, 107 aa, synthetic construct
  REGION 1..107: note = Artificial polymer
DIVMTQTPLSLPVTPGEPASISCKASQDVGTAVAWYLQKPGQSPQLLIYWASTRHTGIPARFSGSGSGTEFTLTISSLQSEDFAVYYCQQYNSYPLTFGQGTKVEIK

SEQ ID NO: 178 - protein, 107 aa, synthetic construct
  REGION 1..107: note = Artificial polymer
DIQMTQSPSSLSASVGDRVTITCKASQDVGTAVAWYLQKPGQSPQLLIYWASTRHTGVPSRFSGSGSGTDFTLTISSLQPEDFATYYCQQYNSYPLTFGQGTKVEIK

SEQ ID NO: 179 - protein, 107 aa, synthetic construct
  REGION 1..107: note = Artificial polymer
EIVLTQSPDFQSVTPKEKVTITCKASQDVGTAVAWYLQKPGQSPQLLIYWASTRHTGVPDRFSGSGSGTDFTLKISRVEAEDVGVYYCQQYNSYPLTFGQGTKVEIK

SEQ ID NO: 180 - protein, 107 aa, synthetic construct
  REGION 1..107: note = Artificial polymer
EIVLTQSPDFQSVTPKEKVTITCKASQDVGTAVAWYLQKPGQSPQLLIYWASTRHTGVPSRFSGSGSGTDFTFTISSLQPEDIATYYCQQYNSYPLTFGQGTKVEIK

SEQ ID NO: 181 - protein, 107 aa, synthetic construct
  REGION 1..107: note = Artificial polymer
EIVLTQSPATLSLSPGERATLSCKASQDVGTAVAWYLQKPGQSPQLLIYWASTRHTGIPPRFSGSGYGTDFTLTINNIESEDAAYYFCQQYNSYPLTFGQGTKVEIK

SEQ ID NO: 182 - protein, 107 aa, synthetic construct
  REGION 1..107: note = Artificial polymer
DVVMTQSPLSLPVTLGQPASISCKASQDVGTAVAWYQQKPGQAPRLLIYWASTRHTGVPSRFSGSGSGTEFTLTISSLQPDDFATYYCQQYNSYPLTFGQGTKVEIK

SEQ ID NO: 183 - protein, 107 aa, synthetic construct
  REGION 1..107: note = Artificial polymer
DIQMTQSPSSLSASVGDRVTITCKASQDVGTAVAWYQQKPGQAPRLLIYWASTRHTGVPSRFSGSGSGTDFTFTISSLQPEDIATYYCQQYNSYPLTFGQGTKVEIK

SEQ ID NO: 184 - protein, 107 aa, synthetic construct
  REGION 1..107: note = Artificial polymer
AIQLTQSPSSLSASVGDRVTITCKASQDVGTAVAWYLQKPGQSPQLLIYWASTRHTGVPSRFSGSGSGTDFTFTISSLEAEDAATYYCQQYNSYPLTFGQGTKVEIK

SEQ ID NO: 185 - protein, 107 aa, synthetic construct
  REGION 1..107: note = Artificial polymer
EIVLTQSPDFQSVTPKEKVTITCKASQDVGTAVAWYQQKPGQAPRLLIYWASTRHTGVPSRFSGSGSGTEFTLTISSLQPDDFATYYCQQYNSYPLTFGQGTKVEIK

SEQ ID NO: 186 - protein, 116 aa, synthetic construct
  REGION 1..116: note = Artificial polymer
EVKLVESGGGLVKPGGSLKLSCAASGFIFRSYGMSWVRQTPEKRLEWVASISSGGSTYYPDSVKGRFTISRDNARNILYLQMSSLRSEDTAMYDCARGYDSGFAYWGQGTLVTVSE

SEQ ID NO: 187 - protein, 116 aa, synthetic construct
  REGION 1..116: note = Artificial polymer
EVKLVESGGGLVKPGGSLKLSCAASGFTFRSYGMSWVRQTPEKRLEWVASISSGGTTYYPDSVKGRFIISRDNARNILYLQMSSLRSEDTAMYYCAKGYDSGFAYWGQGTLVIVSA

SEQ ID NO: 188 - protein, 116 aa, synthetic construct
  REGION 1..116: note = Artificial polymer
QVQLKQSGPGLVQPSQSLSITCTVSGFSLTTYGVHWVRQSPGKGLEWLGVIWRGVTTDYNAAFMSRLTITKDNSKSQVFFKMNSLQANDTAIYYCARLGFYAMDYWGQGTSVTVSS

SEQ ID NO: 189 - protein, 116 aa, synthetic construct
  REGION 1..116: note = Artificial polymer
QVQLKQSGPGLVQPSQSLSITCTVSGFSLTSYGVHWVRQSPGKGLEWLGVIWSGGVTDYNAAFISRLSISKDNSKSQVFFKMNSLQANDTAIYYCARLGFYAMDYWGQGTSVTVSS

SEQ ID NO: 190 - protein, 119 aa, synthetic construct
  REGION 1..119: note = Artificial polymer
EVKLFESGGGLVQPGGSLKLSCVASGFDFSTYWMHWVRQAPGQGLEWIGQINPDSTTINYAPSLKDRFIISRDNAKNTLFLQMSKVRSEDTALYYCAKPGDYGYDFDCWGQGTTLTVSS

SEQ ID NO: 191 - protein, 119 aa, synthetic construct
  REGION 1..119: note = Artificial polymer
EVQLQESGPSLVKPSQTLSLTCSVTGDSITSGYWNWIRKFPGNKLEYMGYISYSGSTYYNPSLKSRISITRDTSKNQYYLQLNSVTTEDTATYYCARSLLWFSTGFAYWGQGTLVTVSA

SEQ ID NO: 192 - protein, 116 aa, synthetic construct
  REGION 1..116: note = Artificial polymer
QVQLKQSGPGLVQPSQSLSITCTVSGFSLTSYGVHWVRQSPGKGLEWLGVIWSGGITDYNAAFKSRLSISKDNSKSQVFFKMNSLQANDTAIYFCARLGFYAMDYWGQGTSVTVSS

SEQ ID NO: 193 - protein, 116 aa, synthetic construct
  REGION 1..116: note = Artificial polymer
EVKLVESGGGLVKPGGSLKLSCAASGFTFRSYGMSWARQIPEKRLEWVASISSGGTTYYLGSVQGRFTISRDNARNILYLQMSSLRSEDTAMYYCARGYDAGFAYWGQGTLVSVSE

SEQ ID NO: 194 - protein, 117 aa, synthetic construct
  REGION 1..117: note = Artificial polymer
EVQLQESGPSLVKPSQTLSLTCSVTGDSITSGYWTWIRKFPGNKLEYMGYISYTGSTYYNPSLKSRISISRDTSKSQYYLQLNSVTTEDTATYYCARQRDWLGFAYWGQGTLVTVSA

SEQ ID NO: 195 - protein, 116 aa, synthetic construct
  REGION 1..116: note = Artificial polymer
EEKLVESGGGLVKPGGSLKLSCAASGFSFSSYGMSWVRQTPEKRLEWVASISSGGSIYYPDSVKGRFTISRDNARNILYLQMSSLRSEDTAMYYCARGYDAGFAFWGQGTLVTASA

SEQ ID NO: 196 - protein, 116 aa, synthetic construct
  REGION 1..116: note = Artificial polymer
QITLKESGPTLVKPTQTLTLTCTVSGFSLSTYGVHWIRQPPGKALEWLGVIWRGVTTDYNAAFMSRLTITKDNSKNQVVLTMNNMDPVDTATYYCARLGFYAMDYWGQGTLVTVSS

SEQ ID NO: 197 - protein, 116 aa, synthetic construct
  REGION 1..116: note = Artificial polymer
EVQLVESGGGLVKPGGSLRLSCAASGFIFRSYGMSWVRQAPGKGLEWVASISSGGSTYYPDSVKGRFTISRDNAKNSLYLQMNSLRAEDTAVYDCARGYDSGFAYWGQGTLVTVSS

SEQ ID NO: 198 - protein, 112 aa, synthetic construct
  REGION 1..112: note = Artificial polymer
DIVLTQSPASLAVSLGQRATISCRASQSVSTSSSSFMHWYQQKPGQPPKLLIKYASNLESGVPARFSGSGSGTDFTLNIHPVEEEDTATYYCQHSWEIPYTFGGGTKLEIKR

SEQ ID NO: 199 - protein, 111 aa, synthetic construct
  REGION 1..111: note = Artificial polymer
DIVLTQSPPSLAVSLGQRATISCRASQSVSTSSSSYMHWYQQKPGQPPKLLIKYASNLESGVPARFSGSGSGTDFTLNIHPVEEEDTATYYCQHSWEIPYTFGGGTKLEIK

SEQ ID NO: 200 - protein, 107 aa, synthetic construct
  REGION 1..107: note = Artificial polymer
SIVMTQTPKFLLVSAGDRVTITCKASQSVSNDVAWYQQKPGQSPKLLIYYAANRYTGVPDRFTGSGYGTDFTFTISIVQAEDLAVYFCQQDYTSPYTFGGGTKLEIK

SEQ ID NO: 201 - protein, 107 aa, synthetic construct
  REGION 1..107: note = Artificial polymer
SIVMTQTPKFLLVSAGDRVTITCKASQSVSNDVGWYQQKPGQSPKLLIYYASNRYSGVPDRFTGSGYGTDFTFTISTVQAEDLAVYFCQQDYTSPYTFGGGTKLEIK

SEQ ID NO: 202 - protein, 112 aa, synthetic construct
  REGION 1..112: note = Artificial polymer
DVLMTQTPLYLPVSLGDQASISCRSSQIIVHSNANTYLEWFLQKPGQSPKLLIYKVSNRFSGVPDRFSGSGSGTDFTLKISRVEAEDLGVYYCFQGSHVPYTFGGGTKLEIK

SEQ ID NO: 203 - protein, 108 aa, synthetic construct
  REGION 1..108: note = Artificial polymer
QIVLTQSPAIMSASPGEKVTLTCSASSSVSSSYLYWNQQKPGSSPKVWIYNTSNLASGVPARFSGSGSGTSYSLTISSMEAEDAASYFCHQWRSYPPTLGAGTKLELK

SEQ ID NO: 204 - protein, 106 aa, synthetic construct
  REGION 1..106: note = Artificial polymer
QIVLTQSPAIMSASPGEKVTMTCSANSSVSYMHWYQQKSGTSPKRWIYDTSKLASGVPARFSGSGSGTSYSLTISSMGAEDAATYYCQQWSSNPWTFGGGTKLEIK

SEQ ID NO: 205 - protein, 111 aa, synthetic construct
  REGION 1..111: note = Artificial polymer
DIVLTQSPASLAVSLGQRATISCRASQSVSTSSYSYMHWYQQKPGQPPKLLIKYASNLESGVPARFSGSGSGTDFTLNIHPVEEEDTATYYCQNSWEIPYTFGGGTKLEIK

SEQ ID NO: 206 - protein, 113 aa, synthetic construct
  REGION 1..113: note = Artificial polymer
DIVMTQTPSSLAVSLGEKVTMSCKSSQSLLYSSNQKNSLAWYQQKPGQSPKLLIYWASNRESGVPDRFTGSSSGTDFTLTISSVKAEDLAVYYCQQYYSYPLTFGAGTKLELK

SEQ ID NO: 207 - protein, 111 aa, synthetic construct
  REGION 1..111: note = Artificial polymer
DIVLTQSPASLAVSLGQRATISCRASQSVSTSSYSYVHWYQQKPGQPPKLLIKYASNLESGVPARFSGSGSGTDFTLNIHPVEEEDTATYYCQHSWEIPYTFGGGTKLEIK

SEQ ID NO: 208 - protein, 107 aa, synthetic construct
  REGION 1..107: note = Artificial polymer
DIQMTQSPSSLSASVGDRVTITCKASQSVSNDVAWYQQKPGKAPKLLIYYAANRYTGVPDRFSGSGYGTDFTFTISSLQPEDIATYFCQQDYTSPYTFGQGTKLEIK

SEQ ID NO: 209 - protein, 111 aa, synthetic construct
  REGION 1..111: note = Artificial polymer
DIVLTQSPASLAVSPGQRATITCRASQSVSTSSSSFMHWYQQKPGQPPKLLIKYASNLESGVPARFSGSGSGTDFTLTINPVEANDTANYYCQHSWEIPYTFGQGTKLEIK

SEQ ID NO: 210 - protein, 117 aa, synthetic construct
  REGION 1..117: note = Artificial polymer
EVQLVQSGAEVKKPGESLRISCKGSGYTFTTYWMHWVRQATGQGLEWMGNIYPGTGGSNFDEKFKNRVTITADKSTSTAYMELSSLRSEDTAVYYCTRWTTGTGAYWGQGTTVTVSS

SEQ ID NO: 211 - protein, 117 aa, synthetic construct
  REGION 1..117: note = Artificial polymer
EVQLVQSGAEVKKPGESLRISCKGSGYTFTTYWMHWIRQSPSRGLEWLGNIYPGTGGSNFDEKFKNRFTISRDNSKNTLYLQMNSLRAEDTAVYYCTRWTTGTGAYWGQGTTVTVSS

SEQ ID NO: 212 - protein, 117 aa, synthetic construct
  REGION 1..117: note = Artificial polymer
QVQLVQSGAEVKKPGASVKVSCKASGYTFTTYWMHWIRQSPSRGLEWLGNIYPGTGGSNFDEKFKNRFTISRDNSKNTLYLQMNSLRAEDTAVYYCTRWTTGTGAYWGQGTTVTVSS

SEQ ID NO: 213 - protein, 117 aa, synthetic construct
  REGION 1..117: note = Artificial polymer
EVQLVQSGAEVKKPGESLRISCKGSGYTFTTYWMHWVRQAPGQGLEWMGNIYPGTGGSNFDEKFKNRFTISRDNSKNTLYLQMNSLRAEDTAVYYCTRWTTGTGAYWGQGTTVTVSS

SEQ ID NO: 214 - protein, 113 aa, synthetic construct
  REGION 1..113: note = Artificial polymer
EIVLTQSPATLSLSPGERATLSCKSSQSLLDSGNQKNFLTWYQQKPGQAPRLLIYWASTRESGVPSRFSGSGSGTEFTLTISSLQPDDFATYYCQNDYSYPYTFGQGTKVEIK

SEQ ID NO: 215 - protein, 113 aa, synthetic construct
  REGION 1..113: note = Artificial polymer
DIQMTQSPSSLSASVGDRVTITCKSSQSLLDSGNQKNFLTWYQQKPGQAPRLLIYWASTRESGIPPRFSGSGYGTDFTLTINNIESEDAAYYFCQNDYSYPYTFGQGTKVEIK

SEQ ID NO: 216 - protein, 113 aa, synthetic construct
  REGION 1..113: note = Artificial polymer
EIVLTQSPATLSLSPGERATLSCKSSQSLLDSGNQKNFLTWYQQKPGKAPKLLIYWASTRESGVPSRFSGSGSGTDFTFTISSLQPEDIATYYCQNDYSYPYTFGQGTKVEIK

SEQ ID NO: 217 - protein, 113 aa, synthetic construct
  REGION 1..113: note = Artificial polymer
DIVMTQTPLSLPVTPGEPASISCKSSQSLLDSGNQKNFLTWYQQKPGQAPRLLIYWASTRESGVPSRFSGSGSGTDFTFTISSLEAEDAATYYCQNDYSYPYTFGQGTKVEIK

SEQ ID NO: 218 - protein, 113 aa, synthetic construct
  REGION 1..113: note = Artificial polymer
EIVLTQSPATLSLSPGERATLSCKSSQSLLDSGNQKNFLTWYQQKPGKAPKLLIYWASTRESGVPSRFSGSGSGTDFTFTISSLEAEDAATYYCQNDYSYPYTFGQGTKVEIK

SEQ ID NO: 219 - protein, 113 aa, synthetic construct
  REGION 1..113: note = Artificial polymer
EIVLTQSPDFQSVTPKEKVTITCKSSQSLLDSGNQKNFLTWYQQKPGQAPRLLIYWASTRESGVPSRFSGSGSGTDFTFTISSLEAEDAATYYCQNDYSYPYTFGQGTKVEIK

SEQ ID NO: 220 - protein, 113 aa, synthetic construct
  REGION 1..113: note = Artificial polymer
EIVLTQSPATLSLSPGERATLSCKSSQSLLDSGNQKNFLTWYQQKPGQAPRLLIYWASTRESGVPSRFSGSGSGTDFTFTISSLEAEDAATYYCQNDYSYPYTFGQGTKVEIK

SEQ ID NO: 221 - protein, 113 aa, synthetic construct
  REGION 1..113: note = Artificial polymer
DIQMTQSPSSLSASVGDRVTITCKSSQSLLDSGNQKNFLTWYLQKPGQSPQLLIYWASTRESGVPSRFSGSGSGTDFTFTISSLEAEDAATYYCQNDYSYPYTFGQGTKVEIK

SEQ ID NO: 222 - protein, 113 aa, synthetic construct
  REGION 1..113: note = Artificial polymer
DVVMTQSPLSLPVTLGQPASISCKSSQSLLDSGNQKNFLTWYQQKPGKAPKLLIYWASTRESGVPSRFSGSGSGTDFTFTISSLEAEDAATYYCQNDYSYPYTFGQGTKVEIK

SEQ ID NO: 223 - protein, 118 aa, synthetic construct
  REGION 1..118: note = Artificial polymer
EVQLVESGGGLVQPGGSLRLSCAASGFTFSDSWIHWVRQAPGKGLEWVAWISPYGGSTYYADSVKGRFTISADTSKNTAYLQMNSLRAEDTAVYYCARRHWPGGFDYWGQGTLVTVSA

SEQ ID NO: 224 - protein, 108 aa, synthetic construct
  REGION 1..108: note = Artificial polymer
DIQMTQSPSSLSASVGDRVTITCRASQDVSTAVAWYQQKPGKAPKLLIYSASFLYSGVPSRFSGSGSGTDFTLTISSLQPEDFATYYCQQYLYHPATFGQGTKVEIKR

SEQ ID NO: 225 - protein, 126 aa, synthetic construct
  REGION 1..126: note = Artificial polymer
EVQLVESGGGLVQPGGSLRLSCAASGFTLDYYAIGWFRQAPGKEREWASSISSSDGSTYYADSVKGRFTISRDNAKNTVFLQMNSLKPEDTAVYSCAASQAPITIATMMKPFYDYWGQGTQVTVSS

SEQ ID NO: 226 - protein, 123 aa, synthetic construct
  REGION 1..123: note = Artificial polymer
EVQLVESGGGLVQPGGSLRLSCAASGFTLDYYAKCWFRQAPGKEREWVSCISSSDGSTYYADSVKGRFTISRDNAKNTVYLQMNSLKPEDTAVYFCAARHGGPLTVEYFFDYWGQGTQVTVSS

SEQ ID NO: 227 - protein, 124 aa, synthetic construct
  REGION 1..124: note = Artificial polymer
EVQLVESGGGLVQPGGSLRLSCAASGFTFDYYAIGWFRQAPGKAREGVSCISGGDNSTYYADSVKGRFTISRDNAKNTVYLQMNSLKPEDTAVYYCATGGWKYCSGYDPEYIYWGQGTQVTVSS

SEQ ID NO: 228 - protein, 115 aa, synthetic construct
  REGION 1..115: note = Artificial polymer
EVQLVESGGGLVQAGGSLRLSCAASGSTFSQYDVGWYRQAPGKQRELVAFSSSGGRTIYPDSVKGRFTFSRDNTKNTVYLQMTSLKPEDTAVYYCKIDWYLNSYWGQGTQVTVSS

SEQ ID NO: 229 - protein, 114 aa, synthetic construct
  REGION 1..114: note = Artificial polymer
EVQLVESGGGLVQAGGSLRLSCAASGVDASNSAMGWYRQAPGKQREWVARITGGGLIAYTDSVKGRFTISRDNAKSTVYLQMNSLEPEDTAVYYCNTINSRDGWGQGTQVTVSS

SEQ ID NO: 230 - protein, 111 aa, synthetic construct
  REGION 1..111: note = Artificial polymer
EVQLVESGGGLVQAGGSLTISCAASGITFSDSIVSWYRRARGKQREWVAGISNGGTTKYAESVLGRFTISRDNAKNNVYLQMNGLNPEDTAVYLCKVRQYWGQGTQVTVSS

SEQ ID NO: 231 - protein, 130 aa, synthetic construct
  REGION 1..130: note = Artificial polymer
EVQLVESGGGLVQAGGSLRLSCAASESTVLINAMGWYRQAPGKQRELVASISSGGSTNYADSVKGRFTISRDNAKNTVYLQMNSLKPEDTAVYYCNADVYPQDYGLGYVEGKVYYGHDYWGTGTLVTVSS

SEQ ID NO: 232 - protein, 119 aa, synthetic construct
  REGION 1..119: note = Artificial polymer
EVQLVESGGGLVQAGGSLRLSCAASGSTFSNYVSNYAMGWGRQAPGTQRELVASISNGDTTNYADSVKGRFTISRDNAKNTVYLQMNSLKPEDTAVYYCFEHQVAGLTWGQGTQVTVSS

SEQ ID NO: 233 - protein, 118 aa, synthetic construct
  REGION 1..118: note = Artificial polymer
  SITE 27: note = misc_feature - Xaa can be any naturally occurring amino acid
  SITE 32: note = misc_feature - Xaa can be any naturally occurring amino acid
  SITE 75: note = misc_feature - Xaa can be any naturally occurring amino acid
EVQLVESGGGLVQAGGSLRLSCVASGXALKIXVMGWYRQAPGKQRELVAAITSGGRTNYSDSVKGRFTISGDNAXNTVYLQMNSLKSEDTAVYYCREWNSGYPPVDYWGQGTQVTVSS

SEQ ID NO: 234 - protein, 120 aa, synthetic construct
  REGION 1..120: note = Artificial polymer
EVQLVESGGGLVQAGGSLRLSCAASGRTFSSGTMGWFRRAPGKEREFVASIPWSGGRTYYADSVKDRFTISRDNAQNTVFLQMNSLKPEDTAVYYCAFKERSTGWDFASWGQGIQVTVSS

SEQ ID NO: 235 - protein, 127 aa, synthetic construct
  REGION 1..127: note = Artificial polymer
EVQLVESGGGLVQTGGSLRLSCAASGFTLDYYGIGWFRQAPGKEREGVSFISGSDGSTYYAESVKGRFTISRDKAKNTVYLQMNSLKPEDTAVYYCAADPWGPPSIATMTSYEYKHWGQGTQVTVSS

SEQ ID NO: 236 - protein, 113 aa, synthetic construct
  REGION 1..113: note = Artificial polymer
EVQLVESGGGLVQPGGSLRLSCAASGFTFSTYTMIWLRRAPGKGFEWVSTIDKDGNTNYVDSVKGRFAVSRDNTKNTLYLQMNSLKPEDTAMYYCTKHGSSARGQGTRVTVSS

SEQ ID NO: 237 - protein, 114 aa, synthetic construct
  REGION 1..114: note = Artificial polymer
EVQLVESGGGLVEPGGSLRLSCVASGFTFSSYDMSWVRQAPGKGLEWVSTINSGGGITYRGSVKGRFTISRDNAKNTLYLQMNSLKPEDTAVYYCENGGSSYRRGQGTQVTVSS

SEQ ID NO: 238 - protein, 114 aa, synthetic construct
  REGION 1..114: note = Artificial polymer
QVQLVQSGAELKKPGASVKMSCKASGYTFTGYTMHWVKQAPGQGLEWIGYINPRSGYTEYNQKFKDRTTLTADKSTSTAYMELSSLRSEDSAVYYCARPWFAYWGQGTLVTVSS

SEQ ID NO: 239 - protein, 114 aa, synthetic construct
  REGION 1..114: note = Artificial polymer
QVQLVQSGAEVKKPGASVKMSCKASGYTFTGYTMHWVKQAPGQGLEWIGYINPRSGYTEYNQKFKDRTTLTADKSTSTAYMELSSLRSEDTAVYYCARPWFAYWGQGTLVTVSS

SEQ ID NO: 240 - protein, 114 aa, synthetic construct
  REGION 1..114: note = Artificial polymer
QVQLVQSGAEVKKPGASVKMSCKASGYTFTGYTMHWVRQAPGQGLEWIGYINPRSGYTEYNQKFKDRTTLTADKSTSTAYMELSSLRSEDTAVYYCARPWFAYWGQGTLVTVSS

SEQ ID NO: 241 - protein, 114 aa, synthetic construct
  REGION 1..114: note = Artificial polymer
QVQLVQSGAEVKKPGASVKVSCKASGYTFTGYTMHWVRQAPGQGLEWIGYINPRSGYTEYNQKFKDRTTLTADKSTSTAYMELSSLRSEDTAVYYCARPWFAYWGQGTLVTVSS

SEQ ID NO: 242 - protein, 114 aa, synthetic construct
  REGION 1..114: note = Artificial polymer
QVQLVQSGAEVKKPGASVKVSCKASGYTFTGYTMHWVRQAPGQGLEWIGYINPRSGYTEYNQKFKDRTTITADKSTSTAYMELSSLRSEDTAVYYCARPWFAYWGQGTLVTVSS

SEQ ID NO: 243 - protein, 113 aa, synthetic construct
  REGION 1..113: note = Artificial polymer
DIVMTQSPASLTVTPGEKVTITCKSSQSLLNSGNQKNYLTWYQQKPGQPPKLLIYWASTRESGVPDRFTGSGSGTDFTLTISSLQAEDVAVYYCQNDYSYPLTFGQGTKLEIK

SEQ ID NO: 244 - protein, 113 aa, synthetic construct
  REGION 1..113: note = Artificial polymer
DIVMTQSPASLSVTPGEKVTITCKSSQSLLNSGNQKNYLTWYQQKPGQPPKLLIYWASTRESGVPDRFTGSGSGTDFTLTISSLQAEDVAVYYCQNDYSYPLTFGQGTKLEIK

SEQ ID NO: 245 - protein, 113 aa, synthetic construct
  REGION 1..113: note = Artificial polymer
DIVMTQSPAFLSVTPGEKVTITCKSSQSLLNSGNQKNYLTWYQQKPGQPPKLLIYWASTRESGVPDRFTGSGSGTDFTLTISSLQAEDVAVYYCQNDYSYPLTFGQGTKLEIK

SEQ ID NO: 246 - protein, 113 aa, synthetic construct
  REGION 1..113: note = Artificial polymer
DIVMTQSPAFLSVTPGEKVTITCKSSQSLLNSGNQKNYLTWYQQKPGQPPKLLIYWASTRESGVPDRFSGSGSGTDFTLTISSLQAEDVAVYYCQNDYSYPLTFGQGTKLEIK

SEQ ID NO: 247 - protein, 5 aa, synthetic construct
  REGION 1..5: note = Artificial polymer
GGGGS

SEQ ID NO: 248 - protein, 10 aa, synthetic construct
  REGION 1..10: note = Artificial polymer
GGGGSGGGGS

SEQ ID NO: 249 - protein, 15 aa, synthetic construct
  REGION 1..15: note = Artificial polymer
GGGGSGGGGSGGGGS

SEQ ID NO: 250 - protein, 20 aa, synthetic construct
  REGION 1..20: note = Artificial polymer
GGGGSGGGGSGGGGSGGGGS

SEQ ID NO: 251 - protein, 25 aa, synthetic construct
  REGION 1..25: note = Artificial polymer
GGGGSGGGGSGGGGSGGGGSGGGGS

SEQ ID NO: 252 - protein, 30 aa, synthetic construct
  REGION 1..30: note = Artificial polymer
GGGGSGGGGSGGGGSGGGGSGGGGSGGGGS

SEQ ID NO: 253 - protein, 35 aa, synthetic construct
  REGION 1..35: note = Artificial polymer
GGGGSGGGGSGGGGSGGGGSGGGGSGGGGSGGGGS

SEQ ID NO: 254 - protein, 40 aa, synthetic construct
  REGION 1..40: note = Artificial polymer
GGGGSGGGGSGGGGSGGGGSGGGGSGGGGSGGGGSGGGGS

SEQ ID NO: 255 - protein, 16 aa, synthetic construct
  REGION 1..16: note = Artificial polymer
GGSGGSGGGGSGGGGS

SEQ ID NO: 256 - protein, 8 aa, synthetic construct
  REGION 1..8: note = Artificial polymer
GGGGGGGG

SEQ ID NO: 257 - protein, 6 aa, synthetic construct
  REGION 1..6: note = Artificial polymer
GGGGGG

SEQ ID NO: 258 - protein, 5 aa, synthetic construct
  REGION 1..5: note = Artificial polymer
EAAAK

SEQ ID NO: 259 - protein, 10 aa, synthetic construct
  REGION 1..10: note = Artificial polymer
EAAAKEAAAK

SEQ ID NO: 260 - protein, 15 aa, synthetic construct
  REGION 1..15: note = Artificial polymer
EAAAKEAAAKEAAAK

SEQ ID NO: 261 - protein, 12 aa, synthetic construct
  REGION 1..12: note = Artificial polymer
AEAAAKEAAAKA

SEQ ID NO: 262 - protein, 17 aa, synthetic construct
  REGION 1..17: note = Artificial polymer
AEAAAKEAAAKEAAAKA

SEQ ID NO: 263 - protein, 22 aa, synthetic construct
  REGION 1..22: note = Artificial polymer
AEAAAKEAAAKEAAAKEAAAKA

SEQ ID NO: 264 - protein, 27 aa, synthetic construct
  REGION 1..27: note = Artificial polymer
AEAAAKEAAAKEAAAKEAAAKEAAAKA

SEQ ID NO: 265 - protein, 46 aa, synthetic construct
  REGION 1..46: note = Artificial polymer
AEAAAKEAAAKEAAAKEAAAKALEAEAAAKEAAAKEAAAKEAAAKA

SEQ ID NO: 266 - protein, 5 aa, synthetic construct
  REGION 1..5: note = Artificial polymer
PAPAP

SEQ ID NO: 267 - protein, 18 aa, synthetic construct
  REGION 1..18: note = Artificial polymer
KESGSVSSEQLAQFRSLD

SEQ ID NO: 268 - protein, 14 aa, synthetic construct
  REGION 1..14: note = Artificial polymer
EGKSSGSGSESKST

SEQ ID NO: 269 - protein, 12 aa, synthetic construct
  REGION 1..12: note = Artificial polymer
GSAGSAAGSGEF

SEQ ID NO: 270 - protein, 5 aa, synthetic construct
  REGION 1..5: note = Artificial polymer
GGGSE

SEQ ID NO: 271 - protein, 5 aa, synthetic construct
  REGION 1..5: note = Artificial polymer
GSESG

SEQ ID NO: 272 - protein, 5 aa, synthetic construct
  REGION 1..5: note = Artificial polymer
GSEGS

SEQ ID NO: 273 - protein, 35 aa, synthetic construct
  REGION 1..35: note = Artificial polymer
GEGGSGEGSSGEGSSSEGGGSEGGGSEGGGSEGGS

SEQ ID NO: 274 - protein, 4 aa, synthetic construct
  REGION 1..4: note = Artificial polymer
CPPC

SEQ ID NO: 275 - protein, 6 aa, synthetic construct
  REGION 1..6: note = Artificial polymer
EEFGNQ

SEQ ID NO: 276 - protein, 7 aa, synthetic construct
  REGION 1..7: note = Artificial polymer
EEFDGNQ

SEQ ID NO: 277 - protein, 10 aa, synthetic construct
  REGION 1..10: note = Artificial polymer
GRTFSSLDMG

SEQ ID NO: 278 - protein, 5 aa, synthetic construct
  REGION 1..5: note = Artificial polymer
SLDMG

SEQ ID NO: 279 - protein, 10 aa, synthetic construct
  REGION 1..10: note = Artificial polymer
GFTFGGYDMG

SEQ ID NO: 280 - protein, 5 aa, synthetic construct
  REGION 1..5: note = Artificial polymer
GYDMG

SEQ ID NO: 281 - protein, 10 aa, synthetic construct
  REGION 1..10: note = Artificial polymer
GRTSSSLDMG

SEQ ID NO: 282 - protein, 10 aa, synthetic construct
  REGION 1..10: note = Artificial polymer
GHTFSSLDMG

SEQ ID NO: 283 - protein, 10 aa, synthetic construct
  REGION 1..10: note = Artificial polymer
ERTFSSLDMG

SEQ ID NO: 284 - protein, 10 aa, synthetic construct
  REGION 1..10: note = Artificial polymer
GRAFSSLDMG

SEQ ID NO: 285 - protein, 10 aa, synthetic construct
  REGION 1..10: note = Artificial polymer
GLNFRRYTMG

SEQ ID NO: 286 - protein, 5 aa, synthetic construct
  REGION 1..5: note = Artificial polymer
RYTMG

SEQ ID NO: 287 - protein, 10 aa, synthetic construct
  REGION 1..10: note = Artificial polymer
GISRSGISQY

SEQ ID NO: 288 - protein, 17 aa, synthetic construct
  REGION 1..17: note = Artificial polymer
GISRSGISQYYADSMKG

SEQ ID NO: 289 - protein, 17 aa, synthetic construct
  REGION 1..17: note = Artificial polymer
GISRSGISQYYADSMRG

SEQ ID NO: 290 - protein, 10 aa, synthetic construct
  REGION 1..10: note = Artificial polymer
GISRTGISAY

SEQ ID NO: 291 - protein, 17 aa, synthetic construct
  REGION 1..17: note = Artificial polymer
GISRTGISAYYADSMKG

SEQ ID NO: 292 - protein, 17 aa, synthetic construct
  REGION 1..17: note = Artificial polymer
GISRSGISQYYANSMKG

SEQ ID NO: 293 - protein, 10 aa, synthetic construct
  REGION 1..10: note = Artificial polymer
GVSRSGISQY

SEQ ID NO: 294 - protein, 17 aa, synthetic construct
  REGION 1..17: note = Artificial polymer
GVSRSGISQYYADSMKG

SEQ ID NO: 295 - protein, 10 aa, synthetic construct
  REGION 1..10: note = Artificial polymer
VINWSDDSIY

SEQ ID NO: 296 - protein, 17 aa, synthetic construct
  REGION 1..17: note = Artificial polymer
VINWSDDSIYYADSVKG

SEQ ID NO: 297 - protein, 15 aa, synthetic construct
  REGION 1..15: note = Artificial polymer
ALTFRGSDLPRDSNY

SEQ ID NO: 298 - protein, 15 aa, synthetic construct
  REGION 1..15: note = Artificial polymer
ALTFRGSNLPRDSNY

SEQ ID NO: 299 - protein, 18 aa, synthetic construct
  REGION 1..18: note = Artificial polymer
SPQWDTRVRQTMRGKYDY

SEQ ID NO: 300 - protein, 143 aa, synthetic construct
  REGION 1..143: note = Artificial polymer
QVQLQESGGGVVQAGDSLRLSCVASGRTFSSLDMGWFRQAPGKEREFVAGISRSGISQYYADSMKGRFTISRDNAKNLVYLQMNSLKPEDTAVYYCAAALTFRGSDLPRDSNYWGQGTQVTVSSAAAYPYDVPDYGSHHHHHH

SEQ ID NO: 301 - protein, 143 aa, synthetic construct
  REGION 1..143: note = Artificial polymer
QVQLQESGGGVVQAGDSLKLSCVASGRTFSSLDMGWFRQAPGKEREFVAGISRSGISQYYADSMKGRFTISRDNAKNLVYLQMNSLKPEDTAVYYCAAALTFRGSDLPRDSNYWGQGTQVTVSSAAAYPYDVPDYGSHHHHHH

SEQ ID NO: 302 - protein, 143 aa, synthetic construct
  REGION 1..143: note = Artificial polymer
QVQLQESGGGVVQAGDSLRLSCVASGRTFSSLDMGWFRQTPGKEREFVAGISRSGISQYYADSMKGRFTISRDNAKNLVYLQMNSLKPEDTAVYYCAAALTFRGSDLPRDSNYWGQGTQVTVSSAAAYPYDVPDYGSHHHHHH

SEQ ID NO: 303 - protein, 143 aa, synthetic construct
  REGION 1..143: note = Artificial polymer
  SITE 46: note = misc_feature - Xaa can be any naturally occurring amino acid
QVQLQESGGGLVQPGDSLRLSCVASGRTFSSLDMGWFRQAPGKERXFVAGISRSGISQYYADSMKGRFTISRDNAKNLVYLQMNSLKPEDTAVYYCAAALTFRGSDLPRDSNYWGQGTQVTVSSAAAYPYDVPDYGSHHHHHH

SEQ ID NO: 304 - protein, 143 aa, synthetic construct
  REGION 1..143: note = Artificial polymer
QVQLQESGGGVVQAGDSLRLSCVASGRTFSSLDMGWFRQAPGKEREFVAGISRSGISQYYADSMRGRFTISRDNAKNLVYLQMNSLKPEDTAVYYCAAALTFRGSDLPRDSNYWGQGTQVTVSSAAAYPYDVPDYGSHHHHHH

SEQ ID NO: 305 - protein, 143 aa, synthetic construct
  REGION 1..143: note = Artificial polymer
QVQLQESGGGVVQAGDSLRLSCVASGRTFSSLDMGWFRQAPGKEREFVAGISRTGISAYYADSMKGRFTISRDNAKNLVYLQMNSLKSEDTAVYYCAAALTFRGSDLPRDSNYWGQGTQVTVSSAAAYPYDVPDYGSHHHHHH

SEQ ID NO: 306 - protein, 143 aa, synthetic construct
  REGION 1..143: note = Artificial polymer
QVQLQESGGGLVQPGGSLRLSCAASGFTFGGYDMGWFRQAPGKEREFVAGISRSGISQYYADSMKGRFTISRDNAKNLVYLQMNSLKPEDTAVYYCAAALTFRGSDLPRDSNYWGQGTQVTVSSAAAYPYDVPDYGSHHHHHH

SEQ ID NO: 307 - protein, 143 aa, synthetic construct
  REGION 1..143: note = Artificial polymer
QVQLQESGGGVVQAGDSLRLSCVASGRTFSSLDMGWFRQAPGKEREFVAGISRSGISQYYADSMKGRFTISRDNAKSLVYLQMNSLKPEDTAVYYCAAALTFRGSDLPRDSNYWGQGTQVTVSSAAAYPYDVPDYGSHHHHHH

SEQ ID NO: 308 - protein, 143 aa, synthetic construct
  REGION 1..143: note = Artificial polymer
QVQLQESGGGLVQAGGSLRLSCTASGRTFSSLDMGWFRQAPGKEREFVAGISRSGISQYYADSMKGRFTISRDNAKNLVYLQMNSLKPEDTAVYYCAAALTFRGSDLPRDSNYWGQGTQVTVSSAAAYPYDVPDYGSHHHHHH

SEQ ID NO: 309 - protein, 143 aa, synthetic construct
  REGION 1..143: note = Artificial polymer
QVQLQESGGGVVQTGDSLRLSCVASGRTFSSLDMGWFRQAPGKEREFVAGISRSGISQYYADSMKGRFTISRDNAKNLVYLQMNSLKPEDTAVYYCAAALTFRGSDLPRDSNYWGQGTQVTVSSAAAYPYDVPDYGSHHHHHH

SEQ ID NO: 310 - protein, 143 aa, synthetic construct
  REGION 1..143: note = Artificial polymer
QVQLQESGGGVVQAGDSLRLSCVASGRTFSSLDMGWFRQAPGKEREFVAGISRSGISQYYANSMKGRFTISRDNAKNLVYLQMNSLKPEDTAVYYCAAALTFRGSDLPRDSNYWGQGTQVTVSSAAAYPYDVPDYGSHHHHHH

SEQ ID NO: 311 - protein, 143 aa, synthetic construct
  REGION 1..143: note = Artificial polymer
QVQLQESGGGVVQAGDPLRLSCVASGRTFSSLDMGWFRQAPGKEREFVAGISRSGISQYYADSMKGRFTISRDNAKNLVYLQMNSLKPEDTAVYYCAAALTFRGSDLPRDSNYWGQGTQVTVSSAAAYPYDVPDYGSHHHHHH

SEQ ID NO: 312 - protein, 143 aa, synthetic construct
  REGION 1..143: note = Artificial polymer
QVQLQESGGGLVQAGGSLRLSCAASGRTFSSLDMGWFRQAPGKEREFVAGISRSGISQYYADSMKGRFTISRDNAKNLVYLQMNSLKPEDTAVYYCAAALTFRGSDLPRDSNYWGQGTQVTVSSAAAYPYDVPDYGSHHHHHH

SEQ ID NO: 313 - protein, 143 aa, synthetic construct
  REGION 1..143: note = Artificial polymer
QVQLQESGGGWVQPGGSLRLSCEASGRTSSSLDMGWFRQAPGKEREFVAGISRTGISAYYADSMKGRFTISRDNAKNLVYLQMNSLKSEDTAVYYCAAALTFRGSDLPRDSNYWGQGTQVTVSSAAAYPYDVPDYGSHHHHHH

SEQ ID NO: 314 - protein, 143 aa, synthetic construct
  REGION 1..143: note = Artificial polymer
QVQLQESGGGSVQAGGSLRLSCVASGRTFSSLDMGWFRQAPGKEREFVAGISRSGISQYYADSMKGRFTISRDNAKNLVYLQMNSLKPEDTAVYYCAAALTFRGSDLPRDSNYWGQGTQVTVSSAAAYPYDVPDYGSHHHHHH

SEQ ID NO: 315 - protein, 143 aa, synthetic construct
  REGION 1..143: note = Artificial polymer
QVQLQESGGGVVQAGDSLRLSCVASGRTFSSLDMGWFRQAPGKEREFVAGVSRSGISQYYADSMKGRFTISRDNAKNLVYLQMNSLKPEDTAVYYCAAALTFRGSDLPRDSNYWGQGTQVTVSSAAAYPYDVPDYGSHHHHHH

SEQ ID NO: 316 - protein, 143 aa, synthetic construct
  REGION 1..143: note = Artificial polymer
QVQLQESGGGLVQPGGSLRLSCAASGRTFSSLDMGWFRQAPGKEREFVAGISRSGISQYYADSMKGRFTISRDNAKNLVYLQINSLKPEDTAVYYCAAALTFRGSDLPRDSNYWGQGTQVTVSSAAAYPYDVPDYGSHHHHHH

SEQ ID NO: 317 - protein, 143 aa, synthetic construct
  REGION 1..143: note = Artificial polymer
QVQLQESGGGVVQAGDSLRLSCVASGHTFSSLDMGWFRQAPGKEREFVAGISRSGISQYYADSMKGRFTISRDNAKNLVYLQMNSLKPEDTAVYYCAAALTFRGSDLPRDSNYWGQGTQVTVSSAAAYPYDVPDYGSHHHHHH

SEQ ID NO: 318 - protein, 143 aa, synthetic construct
  REGION 1..143: note = Artificial polymer
QVQLQESGGGVVQAGDSLRLSCVASERTFSSLDMGWFRQAPGKEREFVAGISRSGISQYYADSMKGRFTISRDNAKNLVYLQMNSLKPEDTAVYYCAAALTFRGSNLPRDSNYWGQGTQVTVSSAAAYPYDVPDYGSHHHHHH

SEQ ID NO: 319 - protein, 143 aa, synthetic construct
  REGION 1..143: note = Artificial polymer
QVQLQESGGGVVQAGDSLRLSCVASERTFSSLDMGWFRQAPGKEREFVAGISRSGISQYYADSMKGRFTISRDNAKNLVYLQMNSLKPEDTAVYYCAAALTFRGSDLPRDSNYWGQGTQVTVSSAAAYPYDVPDYGSHHHHHH

SEQ ID NO: 320 - protein, 143 aa, synthetic construct
  REGION 1..143: note = Artificial polymer
QVQLQESGGGVVQAGDSLGLSCVASGRTFSSLDMGWFRQAPGKEREFVAGISRSGISQYYADSMKGRFTISRDNAKNLVYLQMNSLKPEDTAVYYCAAALTFRGSDLPRDSNYWGQGTQVTVSSAAAYPYDVPDYGSHHHHHH

SEQ ID NO: 321 - protein, 143 aa, synthetic construct
  REGION 1..143: note = Artificial polymer
QVQLQESGGGVVQAGDSLRLSCVASGRAFSSLDMGWFRQAPGKEREFVAGISRSGISQYYADSMKGRFTISRDNAKNLVYLQMNSLKPEDTAVYYCAAALTFRGSDLPRDSNYWGQGTQVTVSSAAAYPYDVPDYGSHHHHHH

SEQ ID NO: 322 - protein, 143 aa, synthetic construct
  REGION 1..143: note = Artificial polymer
QVQLQESGGGVVQAGDSLRLSCVASGRTFSSLDMGWFRQAPGKEREFVAGISRSGISQYYADSMKGRFTISRDNAKNLVYLQMNSLRPEDTAVYYCAAALTFRGSDLPRDSNYWGQGTQVTVSSAAAYPYDVPDYGSHHHHHH

SEQ ID NO: 323 - protein, 143 aa, synthetic construct
  REGION 1..143: note = Artificial polymer
QVQLQESGGGSVQAGDSLRLSCVASGRTFSSLDMGWFRQAPGKEREFVAGISRTGISAYYADSMKGRFTISRDNAKNLVYLQMNSLKSEDTAVYYCAAALTFRGSDLPRDSNYWGQGTQVTVSSAAAYPYDVPDYGSHHHHHH

SEQ ID NO: 324 - protein, 143 aa, synthetic construct
  REGION 1..143: note = Artificial polymer
QVQLQESGGGLVQSGDSLRLSCVASGRTFSSLDMGWFRQAPGKEREFVAGISRSGISQYYADSMKGRFTISRDNAKNLVYLQMNSLKPEDTAVYYCAAALTFRGSDLPRDSNYWGQGTQVTVSSAAAYPYDVPDYGSHHHHHH

SEQ ID NO: 325 - protein, 143 aa, synthetic construct
  REGION 1..143: note = Artificial polymer
QVQLQESGGGLVQAGDSLRLSCVASGRTFSSLDMGWFRQAPGKEREFVAGISRSGISQYYADSMKGRFTISRDNAKNLVYLQMNSLKPEDTAVYYCAAALTFRGSDLPRDSNYWGQGTQVTVSSAAAYPYDVPDYGSHHHHHH

SEQ ID NO: 326 - protein, 146 aa, synthetic construct
  REGION 1..146: note = Artificial polymer
QVQLQESGGGLVQPGGSLRLSCAASGLNFRRYTMGWFRQAPGKEREFVGVINWSDDSIYYADSVKGRFAISRDNTKNTVYLQMASLKPEDTAVYYCAASPQWDTRVRQTMRGKYDYWGQGTQVTVSSAAAYPYDVPDYGSHHHHHH

SEQ ID NO: 327 - protein, 6 aa, synthetic construct
  REGION 1..6: note = Artificial polymer
HHHHHH

SEQ ID NO: 328 - protein, 10 aa, synthetic construct
  REGION 1..10: note = Artificial polymer
YPYDVPDYGS

SEQ ID NO: 329 - protein, 19 aa, synthetic construct
  REGION 1..19: note = Artificial polymer
AAAYPYDVPDYGSHHHHHH

SEQ ID NO: 330 - protein, 166 aa, synthetic construct
  REGION 1..166: note = Artificial polymer
MKYTSYILAFQLCIVLGSLGCYCQDPYVKEAENLKKYFNAGHSDVADNGTLFLGILKNWKEESDRKIMQSQIVSFYFKLFKNFKDDQSIQKSVETIKEDMNVKFFNSNKKKRDDFEKLTNYSVTDLNVQRKAIHELIQVMAELSPAAKTGKRKRSQMLFRGRRASQ

SEQ ID NO: 331 - protein, 143 aa, synthetic construct
  REGION 1..143: note = Artificial polymer
QDPYVKEAENLKKYFNAGHSDVADNGTLFLGILKNWKEESDRKIMQSQIVSFYFKLFKNFKDDQSIQKSVETIKEDMNVKFFNSNKKKRDDFEKLTNYSVTDLNVQRKAIHELIQVMAELSPAAKTGKRKRSQMLFRGRRASQ

SEQ ID NO: 332 - protein, 288 aa, synthetic construct
  REGION 1..288: note = Artificial polymer
MQIPQAPWPVVWAVLQLGWRPGWFLDSPDRPWNPPTFSPALLVVTEGDNATFTCSFSNTSESFVLNWYRMSPSNQTDKLAAFPEDRSQPGQDCRFRVTQLPNGRDFHMSVVRARRNDSGTYLCGAISLAPKAQIKESLRAELRVTERRAEVPTAHPSPSPRPAGQFQTLVVGVVGGLLGSLVLLVWVLAVICSRAARGTIGARRTGQPLKEDPSAVPVFSVDYGELDFQWREKTPEPPVPCVPEQTEYATIVFPSGMGTSSPARRGSADGPRSAQPLRPEDGHCSWPL

SEQ ID NO: 333 - protein, 10 aa, synthetic construct
  REGION 1..10: note = Artificial polymer
GFSMDYYAIA

SEQ ID NO: 334 - protein, 10 aa, synthetic construct
  REGION 1..10: note = Artificial polymer
GFSMDYYAIA

SEQ ID NO: 335 - protein, 10 aa, synthetic construct
  REGION 1..10: note = Artificial polymer
GFSVDYYAIA

SEQ ID NO: 336 - protein, 10 aa, synthetic construct
  REGION 1..10: note = Artificial polymer
GFSMDYYAIA

SEQ ID NO: 337 - protein, 10 aa, synthetic construct
  REGION 1..10: note = Artificial polymer
GGFNRVSYMG

SEQ ID NO: 338 - protein, 10 aa, synthetic construct
  REGION 1..10: note = Artificial polymer
GGFNRVSYMG

SEQ ID NO: 339 - protein, 10 aa, synthetic construct
  REGION 1..10: note = Artificial polymer
GIIKSINFMG

SEQ ID NO: 340 - protein, 10 aa, synthetic construct
  REGION 1..10: note = Artificial polymer
GFILDYYGIG

SEQ ID NO: 341 - protein, 10 aa, synthetic construct
  REGION 1..10: note = Artificial polymer
GLSLDYDGVG

SEQ ID NO: 342 - protein, 10 aa, synthetic construct
  REGION 1..10: note = Artificial polymer
GFILDYYGIG

SEQ ID NO: 343 - protein, 10 aa, synthetic construct
  REGION 1..10: note = Artificial polymer
GRTFSSLGMG

SEQ ID NO: 344 - protein, 10 aa, synthetic construct
  REGION 1..10: note = Artificial polymer
GRTFSSLGMG

SEQ ID NO: 345 - protein, 10 aa, synthetic construct
  REGION 1..10: note = Artificial polymer
GFAFGSYDMG

SEQ ID NO: 346 - protein, 10 aa, synthetic construct
  REGION 1..10: note = Artificial polymer
GFSFGNNDMS

SEQ ID NO: 347 - protein, 5 aa, synthetic construct
  REGION 1..5: note = Artificial polymer
IHAMG

SEQ ID NO: 348 - protein, 5 aa, synthetic construct
  REGION 1..5: note = Artificial polymer
INAMA

SEQ ID NO: 349 - protein, 5 aa, synthetic construct
  REGION 1..5: note = Artificial polymer
SGTMG

SEQ ID NO: 350 - protein, 9 aa, synthetic construct
  REGION 1..9: note = Artificial polymer
GSIASIHAM

SEQ ID NO: 351 - protein, 10 aa, synthetic construct
  REGION 1..10: note = Artificial polymer
GSIASIHAMG

SEQ ID NO: 352 - protein, 5 aa, synthetic construct
  REGION 1..5: note = Artificial polymer
FYGMG

SEQ ID NO: 353 - protein, 10 aa, synthetic construct
  REGION 1..10: note = Artificial polymer
GGTFSFYGMG

SEQ ID NO: 354 - protein, 5 aa, synthetic construct
  REGION 1..5: note = Artificial polymer
YYAIA

SEQ ID NO: 355 - protein, 5 aa, synthetic construct
  REGION 1..5: note = Artificial polymer
VSYMG

SEQ ID NO: 356 - protein, 5 aa, synthetic construct
  REGION 1..5: note = Artificial polymer
INFMG

SEQ ID NO: 357 - protein, 5 aa, synthetic construct
  REGION 1..5: note = Artificial polymer
SLGMG

SEQ ID NO: 358 - protein, 5 aa, synthetic construct
  REGION 1..5: note = Artificial polymer
SYDMG

SEQ ID NO: 359 - protein, 5 aa, synthetic construct
  REGION 1..5: note = Artificial polymer
NNDMS

SEQ ID NO: 360 - protein, 11 aa, synthetic construct
  REGION 1..11: note = Artificial polymer
CITGSDFMVDT

SEQ ID NO: 361 - protein, 11 aa, synthetic construct
  REGION 1..11: note = Artificial polymer
CITGSDFMVDT

SEQ ID NO: 362 - protein, 11 aa, synthetic construct
  REGION 1..11: note = Artificial polymer
CITGSDFMVDT

SEQ ID NO: 363 - protein, 11 aa, synthetic construct
  REGION 1..11: note = Artificial polymer
CITGSDFMVDT

SEQ ID NO: 364 - protein, 8 aa, synthetic construct
  REGION 1..8: note = Artificial polymer
SVTSGGEI

SEQ ID NO: 365 - protein, 8 aa, synthetic construct
  REGION 1..8: note = Artificial polymer
SVTSGGEI

SEQ ID NO: 366 - protein, 8 aa, synthetic construct
  REGION 1..8: note = Artificial polymer
STTSDGRT

SEQ ID NO: 367 - protein, 9 aa, synthetic construct
  REGION 1..9: note = Artificial polymer
CISSSDGST

SEQ ID NO: 368 - protein, 9 aa, synthetic construct
  REGION 1..9: note = Artificial polymer
CISSSDGST

SEQ ID NO: 369 - protein, 9 aa, synthetic construct
  REGION 1..9: note = Artificial polymer
CISSSDGST

SEQ ID NO: 370 - protein, 9 aa, synthetic construct
  REGION 1..9: note = Artificial polymer
AIAWNGAST

SEQ ID NO: 371 - protein, 9 aa, synthetic construct
  REGION 1..9: note = Artificial polymer
AIAWNGAST

SEQ ID NO: 372 - protein, 9 aa, synthetic construct
  REGION 1..9: note = Artificial polymer
GINSGGRIT

SEQ ID NO: 373 - protein, 9 aa, synthetic construct
  REGION 1..9: note = Artificial polymer
AINSGGGST

SEQ ID NO: 374 - protein, 17 aa, synthetic construct
  REGION 1..17: note = Artificial polymer
AITWSGGITYYEDSVKG

SEQ ID NO: 375 - protein, 17 aa, synthetic construct
  REGION 1..17: note = Artificial polymer
VITWSGGITYYADSVKG

SEQ ID NO: 376 - protein, 17 aa, synthetic construct
  REGION 1..17: note = Artificial polymer
VITVSGGITYYADSVKG

SEQ ID NO: 377 - protein, 17 aa, synthetic construct
  REGION 1..17: note = Artificial polymer
AITWSGGITYYADSLKG

SEQ ID NO: 378 - protein, 17 aa, synthetic construct
  REGION 1..17: note = Artificial polymer
LISWSGGSTYYEDSVKG

SEQ ID NO: 379 - protein, 17 aa, synthetic construct
  REGION 1..17: note = Artificial polymer
SIPWSGGRIYYADSVKG

SEQ ID NO: 380 - protein, 10 aa, synthetic construct
  REGION 1..10: note = Artificial polymer
VITWSGGITY

SEQ ID NO: 381 - protein, 10 aa, synthetic construct
  REGION 1..10: note = Artificial polymer
VITVSGGITY

SEQ ID NO: 382 - protein, 17 aa, synthetic construct
  REGION 1..17: note = Artificial polymer
DIRTSAGRTYYADSVKG

SEQ ID NO: 383 - protein, 10 aa, synthetic construct
  REGION 1..10: note = Artificial polymer
DIRTSAGRTY

SEQ ID NO: 384 - protein, 12 aa, synthetic construct
  REGION 1..12: note = Artificial polymer
CITGSDFMVDTY

SEQ ID NO: 385 - protein, 19 aa, synthetic construct
  REGION 1..19: note = Artificial polymer
CITGSDFMVDTYYVASVKG

SEQ ID NO: 386 - protein, 9 aa, synthetic construct
  REGION 1..9: note = Artificial polymer
SVTSGGEIT

SEQ ID NO: 387 - protein, 16 aa, synthetic construct
  REGION 1..16: note = Artificial polymer
SVTSGGEITIADSVKG

SEQ ID NO: 388 - protein, 16 aa, synthetic construct
  REGION 1..16: note = Artificial polymer
SVTSGGEITVADSVKG

SEQ ID NO: 389 - protein, 9 aa, synthetic construct
  REGION 1..9: note = Artificial polymer
STTSDGRTT

SEQ ID NO: 390 - protein, 16 aa, synthetic construct
  REGION 1..16: note = Artificial polymer
STTSDGRTTVADSVKG

SEQ ID NO: 391 - protein, 10 aa, synthetic construct
  REGION 1..10: note = Artificial polymer
CISSSDGSTY

SEQ ID NO: 392 - protein, 10 aa, synthetic construct
  REGION 1..10: note = Artificial polymer
AIAWNGASTY

SEQ ID NO: 393 - protein, 17 aa, synthetic construct
  REGION 1..17: note = Artificial polymer
AIAWNGASTYYTESVKG

SEQ ID NO: 394 - protein, 10 aa, synthetic construct
  REGION 1..10: note = Artificial polymer
GINSGGRITD

SEQ ID NO: 395 - protein, 17 aa, synthetic construct
  REGION 1..17: note = Artificial polymer
GINSGGRITDYADSVTG

SEQ ID NO: 396 - protein, 10 aa, synthetic construct
  REGION 1..10: note = Artificial polymer
AINSGGGSTY

SEQ ID NO: 397 - protein, 17 aa, synthetic construct
  REGION 1..17: note = Artificial polymer
AINSGGGSTYYADSVKG

SEQ ID NO: 398 - protein, 19 aa, synthetic construct
  REGION 1..19: note = Artificial polymer
AVRSTANTLCPSHYSVMDY

SEQ ID NO: 399 - protein, 19 aa, synthetic construct
  REGION 1..19: note = Artificial polymer
AVRSTANTLCPSHYSVMDY

SEQ ID NO: 400 - protein, 19 aa, synthetic construct
  REGION 1..19: note = Artificial polymer
AVRSTANTLCPSHYSIMDY

SEQ ID NO: 401 - protein, 19 aa, synthetic construct
  REGION 1..19: note = Artificial polymer
AVRSTANTLCPSHYSVMDY

SEQ ID NO: 402 - protein, 14 aa, synthetic construct
  REGION 1..14: note = Artificial polymer
NADIWVSDARMYNY

SEQ ID NO: 403 - protein, 14 aa, synthetic construct
  REGION 1..14: note = Artificial polymer
NADIWVSDARMYNY

SEQ ID NO: 404 - protein, 14 aa, synthetic construct
  REGION 1..14: note = Artificial polymer
NADIWLPSDRMYNY

SEQ ID NO: 405 - protein, 13 aa, synthetic construct
  REGION 1..13: note = Artificial polymer
ATATLCDGGIWGY

SEQ ID NO: 406 - protein, 13 aa, synthetic construct
  REGION 1..13: note = Artificial polymer
ATATLCDGGIWGY

SEQ ID NO: 407 - protein, 13 aa, synthetic construct
  REGION 1..13: note = Artificial polymer
ATATLCDGGIWGY

SEQ ID NO: 408 - protein, 17 aa, synthetic construct
  REGION 1..17: note = Artificial polymer
AASGLGSVVVTANEYDY

SEQ ID NO: 409 - protein, 17 aa, synthetic construct
  REGION 1..17: note = Artificial polymer
AASGLGSVVVTANEYDY

SEQ ID NO: 410 - protein, 15 aa, synthetic construct
  REGION 1..15: note = Artificial polymer
AQGDRSSWHYYGMDY

SEQ ID NO: 411 - protein, 13 aa, synthetic construct
  REGION 1..13: note = Artificial polymer
ATKSDPMTNEYDL

SEQ ID NO: 412 - protein, 10 aa, synthetic construct
  REGION 1..10: note = Artificial polymer
DRAESSWYDY

SEQ ID NO: 413 - protein, 10 aa, synthetic construct
  REGION 1..10: note = Artificial polymer
DKHQSSWYDY

SEQ ID NO: 414 - protein, 10 aa, synthetic construct
  REGION 1..10: note = Artificial polymer
DKHQSSFYDY

SEQ ID NO: 415 - protein, 10 aa, synthetic construct
  REGION 1..10: note = Artificial polymer
DRAQSSWYDY

SEQ ID NO: 416 - protein, 10 aa, synthetic construct
  REGION 1..10: note = Artificial polymer
DRVDSNWYDY

SEQ ID NO: 417 - protein, 11 aa, synthetic construct
  REGION 1..11: note = Artificial polymer
KERSTGWDFAS

SEQ ID NO: 418 - protein, 10 aa, synthetic construct
  REGION 1..10: note = Artificial polymer
EMSGISGWDY

SEQ ID NO: 419 - protein, 147 aa, synthetic construct
  REGION 1..147: note = Artificial polymer
QVQLQESGGGLVQPGGSLRLSCAASGFSMDYYAIAWFRQAPGKEREEISCITGSDFMVDTYYVASVKGRFTISRDNAENTAYLQMNNLKPEDTGVYFCAVRSTANTLCPSHYSVMDYWGKGTQVTVSSAAAYPYDVPDYGSHHHHHH

SEQ ID NO: 420 - protein, 147 aa, synthetic construct
  REGION 1..147: note = Artificial polymer
QVQLQESGGGLVQAGGSLRLSCAASGFSMDYYAIAWFRQAPGKEREEISCITGSDFMVDTYYVASVKGRFTISRDNAENTAYLQMNNLKPEDTGVYFCAVRSTANTLCPSHYSVMDYWGKGTQVTVSSAAAYPYDVPDYGSHHHHHH

SEQ ID NO: 421 - protein, 147 aa, synthetic construct
  REGION 1..147: note = Artificial polymer
QVQLQESGGGLVQPGGSLRLSCSASGFSVDYYAIAWFRQAPGKEREEISCITGSDFMVDTYYVASVKGRFTISRDNAKNTAYLQMNSLKPEDTGVYFCAVRSTANTLCPSHYSIMDYWGKGTQVTVSSAAAYPYDVPDYGSHHHHHH

SEQ ID NO: 422 - protein, 147 aa, synthetic construct
  REGION 1..147: note = Artificial polymer
QVQLQESGGGLVQPGGSLRLSCSASGFSMDYYAIAWFRQAPGKEREEISCITGSDFMVDTYYVASVKGRFTISRDNAKNTAHLQMNSLKPEDTGVYFCAVRSTANTLCPSHYSVMDYWGKGTQVTVSSAAAYPYDVPDYGSHHHHHH

SEQ ID NO: 423 - protein, 139 aa, synthetic construct
  REGION 1..139: note = Artificial polymer
QVQLQESGGGLVQAGGSLRLSCAASGGFNRVSYMGWYRQAPGTKRELVASVTSGGEITIADSVKGRFTVSRDNSKNTLYLQMNGLKPEDGATYWCNADIWVSDARMYNYWGQGTQVTVSSAAAYPYDVPDYGSHHHHHH

SEQ ID NO: 424 - protein, 139 aa, synthetic construct
  REGION 1..139: note = Artificial polymer
QVQLQESGGGLVQTGESLRLSCAASGGFNRVSYMGWYRQAPGSKRELVASVTSGGEITVADSVKGRFTVSRDNNKNTLYLQMNGLKPEDGATYWCNADIWVSDARMYNYWGQGTQVTVSSAAAYPYDVPDYGSHHHHHH

SEQ ID NO: 425 - protein, 139 aa, synthetic construct
  REGION 1..139: note = Artificial polymer
QVQLQESGGGLVQTGESLRLSCAASGIIKSINFMGWYRQPPGTKRELVASTTSDGRTTVADSVKGRFTISRDNAKNTIYLEMSSLKPEDTATYWCNADIWLPSDRMYNYWGQGTQVTVSSAAAYPYDVPDYGSHHHHHH

SEQ ID NO: 426 - protein, 139 aa, synthetic construct
  REGION 1..139: note = Artificial polymer
QVQLQESGGGLVQAGGSLRLSCAVSGFILDYYGIGWFRQAPGKEREAVSCISSSDGSTYYADSVKGRFTISRDNALNTLYLQMNSLKPEDTAVYHCATATLCDGGIWGYWGQGTQVTVSSAAAYPYDVPDYGSHHHHHH

SEQ ID NO: 427 - protein, 139 aa, synthetic construct
  REGION 1..139: note = Artificial polymer
QVQLQESGGGLAQAGGSLRLSCEGSGLSLDYDGVGWFRQAPGKEREAVSCISSSDGSTYYADSVKGRFTISRGNALNTLYLQMNSLKPEDTAVYYCATATLCDGGIWGYWGQGTQVTVSSAAAYPYDVPDYGSHHHHHH

SEQ ID NO: 428 - protein, 139 aa, synthetic construct
  REGION 1..139: note = Artificial polymer
QVQLQESGGGSVQPGGSLRLSCAVSGFILDYYGIGWFRQAPGKEREAVSCISSSDGSTYYADSVKGRFTISRDNALNTLYLQMNSLKPEDTAVYYCATATLCDGGIWGYWGQGTQVTVSSAAAYPYDVPDYGSHHHHHH

SEQ ID NO: 429 - protein, 143 aa, synthetic construct
  REGION 1..143: note = Artificial polymer
QVQLQESGGGSVQAGDSLRLSCTASGRTFSSLGMGWFRQAPGKEREFVSAIAWNGASTYYTESVKGRFTISRDDAKNTVYLQMNSLKPTDTAVYFCAASGLGSVVVTANEYDYWGQGTQVTVSSAAAYPYDVPDYGSHHHHHH

SEQ ID NO: 430 - protein, 143 aa, synthetic construct
  REGION 1..143: note = Artificial polymer
QVQLQESGGGSVQPGKSLRLSCAASGRTFSSLGMGWFRQAPGKEREFVSAIAWNGASTYYTESVKGRFTISRDDAKNTVYLQMNSLKPTDTAVYFCAASGLGSVVVTANEYDYWGQGTQVTVSSAAAYPYDVPDYGSHHHHHH

SEQ ID NO: 431 - protein, 141 aa, synthetic construct
  REGION 1..141: note = Artificial polymer
QVQLQESGGGLVQPGGSLRLSCTTSGFAFGSYDMGWVRQAPGKGPEWVSGINSGGRITDYADSVTGRFTISRDNAKNTLYLQMNSLKPEDTAVYYCAQGDRSSWHYYGMDYWGKGTQVTVSSAAAYPYDVPDYGSHHHHHH

SEQ ID NO: 432 - protein, 139 aa, synthetic construct
  REGION 1..139: note = Artificial polymer
  SITE 112: note = misc_feature - Xaa can be any naturally occurring amino acid
QVQLQESGGGLVQPGGSLRLSCAASGFSFGNNDMSWVRQAPGKGPEWVSAINSGGGSTYYADSVKGRFTISRDNAKNTLYLQMNSLKPEDTAVYYCATKSDPMTNEYDLWGXGTQVTVSSAAAYPYDVPDYGSHHHHHH

SEQ ID NO: 433 - protein, 119 aa, synthetic construct
  REGION 1..119: note = Artificial polymer
EVQLVESGGGLVQAGGSLRLSCAASGSIASIHAMGWFRQAPGKEREFVAVITWSGGITYYADSVKGRFTISRDNAKNTVYLQMNSLKPEDTAIYYCAGDKHQSSWYDYWGQGTLVTVSS

SEQ ID NO: 434 - protein, 119 aa, synthetic construct
  REGION 1..119: note = Artificial polymer
EVQLVESGGGLVQAGGSLRLSCAASGSIASIHAMGWFRQAPGKEREFVAVITWSGGITYYADSVKGRFTISRDNAKNTVYLQMNSLKPEDTATYYCAGDKHQSSWYDYWGQGTLVTVSS

SEQ ID NO: 435 - protein, 119 aa, synthetic construct
  REGION 1..119: note = Artificial polymer
EVQLVESGGGLVQAGGSLRLSCAASGSIASIHAMGWFRQAPGKEREFVAVITWSGGITYYADSVKGRFTISRDNAKNTVYLQMNSLKPEDTATYYCAGDKHQSSWYDYWGQGTLVKVSS

SEQ ID NO: 436 - protein, 119 aa, synthetic construct
  REGION 1..119: note = Artificial polymer
EVQLVESGGGVVQAGGSLRLSCAASGGTFSFYGMGWFRQAPGKEQEFVADIRTSAGRTYYADSVKGRFTISRDNAKNTVYLQMNSLKPEDTAVYYCAAEMSGISGWDYWGQGTQVQVSS

SEQ ID NO: 437 - protein, 119 aa, synthetic construct
  REGION 1..119: note = Artificial polymer
EVQLVESGGGVVQAGGSLRLSCAASGGTFSFYGMGWFRQAPGKEQEFVADIRTSAGRTYYADSVKGRFTISRDNAKNTVYLQMNSLKPEDTAVYYCAAEMSGISGWDYWGQGTLVTVKS

SEQ ID NO: 438 - protein, 119 aa, synthetic construct
  REGION 1..119: note = Artificial polymer
EVQLVESGGGVVQAGGSLRLSCAASGGTFSFYGMGWFRQAPGKEQEFVADIRTSAGRTYYADSVKGRFTISRDNAKNTVYLQMNSLKPEDTAVYYCAAEMSGISGWDYWGQGTLVTVQS

SEQ ID NO: 439 - protein, 119 aa, synthetic construct
  REGION 1..119: note = Artificial polymer
EVQLVESGGGLVQAGGSLRLSCAASGSIASIHAMGWFRQAPGKEQEFVADIRTSAGRTYYADSVKGRFTISRDNAKNTVYLQMNSLKPEDTALYYCAAEMSGISGWDYWGQGTLVKVSS

SEQ ID NO: 440 - protein, 119 aa, synthetic construct
  REGION 1..119: note = Artificial polymer
EVQLVESGGGLVQAGGSLRLSCAASGGTFSFYGMGWFRQAPGKEQEFVADIRTSAGRTYYADSVKGRFTISRDNAKNTVYLQMNSLKPEDTALYYCAAEMSGISGWDYWGQGTLVQVSS

SEQ ID NO: 441 - protein, 119 aa, synthetic construct
  REGION 1..119: note = Artificial polymer
EVQLVESGGGLVQAGGSLRLSCAASGGTFSFYGMGWFRQAPGKEQEFVADIRTSAGRTYYADSVKGRFTISRDNAKNTVYLQMNSLKPEDTALYYCAAEMSGISGWDYWGQGTLVTVKS

SEQ ID NO: 442 - protein, 119 aa, synthetic construct
  REGION 1..119: note = Artificial polymer
EVQLVESGGGVVQAGGSLRLSCAASGGTFSFYGMGWFRQAPGKEQEFVADIRTSAGRTYYADSVKGRFTISRDNAKNTVYLQMNSLKPEDTALYYCAAEMSGISGWDYWGQGTLVTVQS

SEQ ID NO: 443 - protein, 119 aa, synthetic construct
  REGION 1..119: note = Artificial polymer
EVQLVESGGGVVQAGGSLRLSCAASGGTFSFYGMGWFRQAPGKEQEFVADIRTSAGRTYYADSVKGRFTISRDNAKNTVYLQMNSLKPEDTALYYCAAEMSGISGWDYWGQGTLVTVSS

SEQ ID NO: 444 - protein, 119 aa, synthetic construct
  REGION 1..119: note = Artificial polymer
EVQLVESGGGVVQAGGSLRLSCAASGGTFSFYGMGWFRQAPGKEQEFVADIRTSAGRTYYADSVKGRFTISRDNAKNTVYLQMNSLKPEDTALYYCAAEMSGISGWDYWGQGTLVKVSS

SEQ ID NO: 445 - protein, 119 aa, synthetic construct
  REGION 1..119: note = Artificial polymer
EVQLVESGGGVVQAGGSLRLSCAASGGTFSFYGMGWFRQAPGKEQEFVADIRTSAGRTYYADSVKGRFTISRDNAKNTVYLQMNSLKPEDTALYYCAAEMSGISGWDYWGQGTLVQVSS

SEQ ID NO: 446 - protein, 119 aa, synthetic construct
  REGION 1..119: note = Artificial polymer
EVQLVESGGGVVQAGGSLRLSCAASGGTFSFYGMGWFRQAPGKEQEFVADIRTSAGRTYYADSVKGRFTISRDNAKNTVYLQMNSLKPEDTALYYCAAEMSGISGWDYWGQGTLVTVKS

SEQ ID NO: 447 - protein, 119 aa, synthetic construct
  REGION 1..119: note = Artificial polymer
EVQLVESGGGVVQPGGSLRLSCAASGGTFSFYGMGWFRQAPGKEQEFVADIRTSAGRTYYADSVKGRFTISRDNSKNTVYLQMNSLRPEDTALYYCAAEMSGISGWDYWGQGTLVTVQS

SEQ ID NO: 448 - protein, 119 aa, synthetic construct
  REGION 1..119: note = Artificial polymer
EVQLVESGGGVVQPGGSLRLSCAASGGTFSFYGMGWFRQAPGKEREFVADIRTSAGRTYYADSVKGRFTISRDNSKNTVYLQMNSLRPEDTALYYCAAEMSGISGWDYWGQGTLVTVSS

SEQ ID NO: 449 - protein, 119 aa, synthetic construct
  REGION 1..119: note = Artificial polymer
DVQLVESGGGVVQPGGSLRLSCAASGGTFSFYGMGWFRQAPGKEQEFVADIRTSAGRTYYADSVKGRFTISRDNSKNTVYLQMNSLRPEDTALYYCAAEMSGISGWDYWGQGTLVTVSS

SEQ ID NO: 450 - protein, 119 aa, synthetic construct
  REGION 1..119: note = Artificial polymer
DVQLVESGGGVVQPGGSLRLSCAASGGTFSFYGMGWFRQAPGKEREFVADIRTSAGRTYYADSVKGRFTISRDNSKNTVYLQMNSLRPEDTALYYCAAEMSGISGWDYWGQGTLVTSSA

SEQ ID NO: 451 - protein, 120 aa, synthetic construct
  REGION 1..120: note = Artificial polymer
EVQLVESGGGLVQAGGSLRLSCAASGGTFSFYGMGWFRQAPGKEQEFVADIRTSAGRTYYADSVKGRFTISRDNAKNTVYLQMNSLKPEDTATYYCAAEMSGISGWDYWGQGTLVKVSSA

SEQ ID NO: 452 - protein, 120 aa, synthetic construct
  REGION 1..120: note = Artificial polymer
EVQLVESGGGVVQAGGSLRLSCAASGGTFSFYGMGWFRQAPGKEQEFVADIRTSAGRTYYADSVKGRFTISRDNAKNTVYLQMNSLKPEDTAVYYCAAEMSGISGWDYWGQGTLVQVSSA

SEQ ID NO: 453 - protein, 120 aa, synthetic construct
  REGION 1..120: note = Artificial polymer
EVQLVESGGGVVQAGGSLRLSCAASGGTFSFYGMGWFRQAPGKEQEFVADIRTSAGRTYYADSVKGRFTISRDNAKNTVYLQMNSLKPEDTAVYYCAAEMSGISGWDYWGQGTLVTVKSA

SEQ ID NO: 454 - protein, 120 aa, synthetic construct
  REGION 1..120: note = Artificial polymer
EVQLVESGGGVVQAGGSLRLSCAASGGTFSFYGMGWFRQAPGKEQEFVADIRTSAGRTYYADSVKGRFTISRDNAKNTVYLQMNSLKPEDTAVYYCAAEMSGISGWDYWGQGTLVTVQSA

SEQ ID NO: 455 - protein, 120 aa, synthetic construct
  REGION 1..120: note = Artificial polymer
EVQLVESGGGVVQAGGSLRLSCAASGGTFSFYGMGWFRQAPGKEQEFVADIRTSAGRTYYADSVKGRFTISRDNAKNTVYLQMNSLKPEDTAVYYCAAEMSGISGWDYWGQGTLVKVSSA

SEQ ID NO: 456 - protein, 120 aa, synthetic construct
  REGION 1..120: note = Artificial polymer
EVQLVESGGGLVQAGGSLRLSCAASGGTFSFYGMGWFRQAPGKEQEFVADIRTSAGRTYYADSVKGRFTISRDNAKNTVYLQMNSLKPEDTALYYCAAEMSGISGWDYWGQGTLVQVSSA

SEQ ID NO: 457 - protein, 120 aa, synthetic construct
  REGION 1..120: note = Artificial polymer
EVQLVESGGGLVQAGGSLRLSCAASGGTFSFYGMGWFRQAPGKEQEFVADIRTSAGRTYYADSVKGRFTISRDNAKNTVYLQMNSLKPEDTALYYCAAEMSGISGWDYWGQGTLVTVKSA

SEQ ID NO: 458 - protein, 120 aa, synthetic construct
  REGION 1..120: note = Artificial polymer
EVQLVESGGGLVQAGGSLRLSCAASGGTFSFYGMGWFRQAPGKEQEFVADIRTSAGRTYYADSVKGRFTISRDNAKNTVYLQMNSLKPEDTALYYCAAEMSGISGWDYWGQGTLVTVQSA

SEQ ID NO: 459 - protein, 120 aa, synthetic construct
  REGION 1..120: note = Artificial polymer
EVQLVESGGGLVQAGGSLRLSCAASGGTFSFYGMGWFRQAPGKEQEFVADIRTSAGRTYYADSVKGRFTISRDNAKNTVYLQMNSLKPEDTALYYCAAEMSGISGWDYWGQGTLVTVSSA

SEQ ID NO: 460 - protein, 120 aa, synthetic construct
  REGION 1..120: note = Artificial polymer
EVQLVESGGGVVQAGGSLRLSCAASGGTFSFYGMGWFRQAPGKEQEFVADIRTSAGRTYYADSVKGRFTISRDNAKNTVYLQMNSLKPEDTALYYCAAEMSGISGWDYWGQGTLVKVSSA

SEQ ID NO: 461 - protein, 120 aa, synthetic construct
  REGION 1..120: note = Artificial polymer
EVQLVESGGGVVQAGGSLRLSCAASGGTFSFYGMGWFRQAPGKEQEFVADIRTSAGRTYYADSVKGRFTISRDNAKNTVYLQMNSLKPEDTALYYCAAEMSGISGWDYWGQGTLVQVSSA

SEQ ID NO: 462 - protein, 120 aa, synthetic construct
  REGION 1..120: note = Artificial polymer
EVQLVESGGGVVQAGGSLRLSCAASGGTFSFYGMGWFRQAPGKEQEFVADIRTSAGRTYYADSVKGRFTISRDNAKNTVYLQMNSLKPEDTALYYCAAEMSGISGWDYWGQGTLVTVKSA

SEQ ID NO: 463 - protein, 120 aa, synthetic construct
  REGION 1..120: note = Artificial polymer
EVQLVESGGGVVQAGGSLRLSCAASGGTFSFYGMGWFRQAPGKEQEFVADIRTSAGRTYYADSVKGRFTISRDNAKNTVYLQMNSLKPEDTALYYCAAEMSGISGWDYWGQGTLVTVQSA

SEQ ID NO: 464 - protein, 120 aa, synthetic construct
  REGION 1..120: note = Artificial polymer
EVQLVESGGGVVQAGGSLRLSCAASGGTFSFYGMGWFRQAPGKEQEFVADIRTSAGRTYYADSVKGRFTISRDNAKNTVYLQMNSLKPEDTALYYCAAEMSGISGWDYWGQGTLVTVSSA

SEQ ID NO: 465 - protein, 120 aa, synthetic construct
  REGION 1..120: note = Artificial polymer
EVQLVESGGGVVQPGGSLRLSCAASGGTFSFYGMGWFRQAPGKEQEFVADIRTSAGRTYYADSVKGRFTISRDNSKNTVYLQMNSLRPEDTALYYCAAEMSGISGWDYWGQGTLVTVSSA

SEQ ID NO: 466 - protein, 119 aa, synthetic construct
  REGION 1..119: note = Artificial polymer
DVQLVESGGGVVQPGGSLRLSCAASGSIASIHAMGWFRQAPGKEREFVAVITWSGGITYYADSVKGRFTISRDNSKNTVYLQMNSLRPEDTALYYCAGDKHQSSWYDYWGQGTLVTVSS

SEQ ID NO: 467 - protein, 119 aa, synthetic construct
  REGION 1..119: note = Artificial polymer
EVQLVESGGGLVQPGGSLRLSCAASGSIASIHAMGWERQAPGKEREEVAVITWSGGITYYADSVKGRFTISRDNSKNTVYLQMNSLRPEDTAIYYCAGDKHQSSWYDYWGQGTLVTVSS

SEQ ID NO: 468 - protein, 119 aa, synthetic construct
  REGION 1..119: note = Artificial polymer
EVQLVESGGGVVQPGGSLRLSCAASGSIASIHAMGWERQAPGKEREEVAVITWSGGITYYADSVKGRFTISRDNSKNTVYLQMNSLRPEDTALYYCAGDKHQSSWYDYWGQGTLVTVSS

SEQ ID NO: 469 - protein, 270 aa, synthetic construct
  REGION 1..270: note = Artificial polymer
DVQLVESGGGVVQPGGSLRLSCAASGSIASIHAMGWERQAPGKEREEVAVITWSGGITYYADSVKGRFTISRDNSKNTVYLQMNSLRPEDTALYYCAGDKHQSSWYDYWGQGTLVTVSSGGGGSGGGGSGGGGSGGGGSGGGGSGGGGSGGGGSEVQLVESGGGVVQPGNSLRLSCAASGFTFSSFGMSWVRQAPGKGLEWVSSISGSGSDTLYADSVKGRFTISRDNAKTTLYLQMNSLRPEDTALYYCTIGGSLSRSSQGTLVTVSSA

SEQ ID NO: 470 - protein, 424 aa, synthetic construct
  REGION 1..424: note = Artificial polymer
DVQLVESGGGVVQPGGSLRLSCAASGSIASIHAMGWERQAPGKEREEVAVITWSGGITYYADSVKGRFTISRDNSKNTVYLQMNSLRPEDTALYYCAGDKHQSSWYDYWGQGTLVTVSSGGGGSGGGGSGGGGSGGGGSGGGGSGGGGSGGGGSEVQLVESGGGVVQPGGSLRLSCAASGSIASIHAMGWFRQAPGKEREFVAVITWSGGITYYADSVKGRFTISRDNSKNTVYLQMNSLRPEDTALYYCAGDKHQSSWYDYWGQGTLVTVSSGGGGSGGGGSGGGGSGGGGSGGGGSGGGGSGGGGSEVQLVESGGGVVQPGNSLRLSCAASGFTFSSFGMSWVRQAPGKGLEWVSSISGSGSDTLYADSVKGRFTISRDNAKTTLYLQMNSLRPEDTALYYCTIGGSLSRSSQGTLVTVSSA

SEQ ID NO: 471 - protein, 119 aa, synthetic construct
  REGION 1..119: note = Artificial polymer
DVQLVESGGGVVQPGGSLRLSCAASGSIASIHAMGWERQAPGKEREEVAVITVSGGITYYADSVKGRFTISRDNSKNTVYLQMNSLRPEDTALYYCAGDKHQSSFYDYWGQGTLVTVSS

SEQ ID NO: 472 - protein, 119 aa, synthetic construct
  REGION 1..119: note = Artificial polymer
DVQLVESGGGVVQPGGSLRLSCAASGSIASIHAMGWFRQAPGKEREFVAVITVSGGITYYADSVKGRFTISRDQSKNTVYLQMNSLRPEDTALYYCAGDKHQSSFYDYWGQGTLVTVSS

SEQ ID NO: 473 - protein, 119 aa, synthetic construct
  REGION 1..119: note = Artificial polymer
DVQLVESGGGVVQPGGSLRLSCAASGSIASIHAMGWFRQAPGKEREFVAVITVSGGITYYADSVKGRFTISRDPSKNTVYLQMNSLRPEDTALYYCAGDKHQSSFYDYWGQGTLVTVSS

SEQ ID NO: 474 - protein, 119 aa, synthetic construct; identical to SEQ ID NO: 473
  REGION 1..119: note = Artificial polymer

SEQ ID NO: 475 - protein, 119 aa, synthetic construct; identical to SEQ ID NO: 472
  REGION 1..119: note = Artificial polymer

SEQ ID NO: 476 - protein, 119 aa, synthetic construct
  REGION 1..119: note = Artificial polymer
DVQLVESGGGVVQPGGSLRLSCAASGSIASIHAMGWFRQAPGKEREFVAVITVSGGITYYADSVKGRFTISRDSSKNTVYLQMNSLRPEDTALYYCAGDKHQSSFYDYWGQGTLVTVSS

SEQ ID NO: 477 - protein, 423 aa, synthetic construct
  REGION 1..423: note = Artificial polymer
EVQLVESGGGLVQPGGSLRLSCAASGSIASIHAMGWERQAPGKEREEVAVITWSGGITYYADSVKGRFTISRDNSKNTVYLQMNSLRPEDTAIYYCAGDKHQSSWYDYWGQGTLVTVSSGGGGSGGGGSGGGGSGGGGSGGGGSGGGGSGGGGSEVQLVESGGGLVQPGGSLRLSCAASGSIASIHAMGWERQAPGKEREEVAVITWSGGITYYADSVKGRFTISRDNSKNTVYLQMNSLRPEDTAIYYCAGDKHQSSWYDYWGQGTLVTVSSGGGGSGGGGSGGGGSGGGGSGGGGSGGGGSGGGGSEVQLVESGGGLVQPGNSLRLSCAASGFTFSSFGMSWVRQAPGKGLEWVSSISGSGSDTLYADSVKGRFTISRDNAKTTLYLQMNSLRPEDTAVYYCTIGGSLSRSSQGTLVTVSS

SEQ ID NO: 478 - protein, 287 aa, synthetic construct
  REGION 1..287: note = Artificial polymer
MQIPQAPWPVVWAVLQLGWRPGWFLDSPDRPWNPPTFSPALLVVTEGDNATFTCSFSNTSESFVLNWYRMSPSNQTDKLAAFPEDRSQPGQDCRFRVTQLPNGRDFHMSVVRARRNDSGTYLCGAISLAPKAQIKESLRAELRVTERRAEVPTAHPSPSPRPAGQFQTLVVGVVGGLLGSLVLLVWVLAVICSRAARGTIGARRTGQPLKEDPSAVPVFVDYGELDFQWREKTPEPPVPCVPEQTEYATIVFPSGMGTSSPARRGSADGPRSAQPLRPEDGHCSWPL

SEQ ID NO: 479 - protein, 119 aa, synthetic construct
  REGION 1..119: note = Artificial polymer
EVQLVESGGGLVQAGGSLRLSCAASGGTFSFYGMGWFRQAPGKEQEFVADIRTSAGRTYYADSVKGRFTISRDNAKNTVYLQMNSLKPEDTAVYYCAAEMSGISGWDYWGQGTQVTVSS

SEQ ID NO: 480 - protein, 119 aa, synthetic construct; identical to SEQ ID NO: 434
  REGION 1..119: note = Artificial polymer

SEQ ID NO: 481 - protein, 119 aa, synthetic construct
  REGION 1..119: note = Artificial polymer
EVQLVESGGGVVQAGGSLRLSCAASGSIASIHAMGWFRQAPGKEREFVAVITWSGGITYYADSVKGRFTISRDNAKNTVYLQMNSLKPEDTAIYYCAGDKHQSSWYDYWGQGTLVKVSS

SEQ ID NO: 482 - protein, 119 aa, synthetic construct
  REGION 1..119: note = Artificial polymer
EVQLVESGGGVVQAGGSLRLSCAASGSIASIHAMGWFRQAPGKEREFVAVITWSGGITYYADSVKGRFTISRDNAKNTVYLQMNSLKPEDTAIYYCAGDKHQSSWYDYWGQGTLVQVSS

SEQ ID NO: 483 - protein, 119 aa, synthetic construct
  REGION 1..119: note = Artificial polymer
EVQLVESGGGVVQAGGSLRLSCAASGSIASIHAMGWFRQAPGKEREFVAVITWSGGITYYADSVKGRFTISRDNAKNTVYLQMNSLKPEDTAIYYCAGDKHQSSWYDYWGQGTLVTVKS

SEQ ID NO: 484 - protein, 119 aa, synthetic construct
  REGION 1..119: note = Artificial polymer
EVQLVESGGGVVQAGGSLRLSCAASGSIASIHAMGWFRQAPGKEREFVAVITWSGGITYYADSVKGRFTISRDNAKNTVYLQMNSLKPEDTAIYYCAGDKHQSSWYDYWGQGTLVTVQS

SEQ ID NO: 485 - protein, 119 aa, synthetic construct
  REGION 1..119: note = Artificial polymer
EVQLVESGGGLVQAGGSLRLSCAASGSIASIHAMGWFRQAPGKEREFVAVITWSGGITYYADSVKGRFTISRDNAKNTVYLQMNSLKPEDTALYYCAGDKHQSSWYDYWGQGTLVKVSS

SEQ ID NO: 486 - protein, 119 aa, synthetic construct
  REGION 1..119: note = Artificial polymer
EVQLVESGGGLVQAGGSLRLSCAASGSIASIHAMGWFRQAPGKEREFVAVITWSGGITYYADSVKGRFTISRDNAKNTVYLQMNSLKPEDTALYYCAGDKHQSSWYDYWGQGTLVQVSS

SEQ ID NO: 487 - protein, 119 aa, synthetic construct
  REGION 1..119: note = Artificial polymer
EVQLVESGGGLVQAGGSLRLSCAASGSIASIHAMGWFRQAPGKEREFVAVITWSGGITYYADSVKGRFTISRDNAKNTVYLQMNSLKPEDTALYYCAGDKHQSSWYDYWGQGTLVTVKS

SEQ ID NO: 488 - protein, 119 aa, synthetic construct
  REGION 1..119: note = Artificial polymer
EVQLVESGGGLVQAGGSLRLSCAASGSIASIHAMGWFRQAPGKEREFVAVITWSGGITYYADSVKGRFTISRDNAKNTVYLQMNSLKPEDTALYYCAGDKHQSSWYDYWGQGTLVTVQS

SEQ ID NO: 489 - protein, 119 aa, synthetic construct
  REGION 1..119: note = Artificial polymer
EVQLVESGGGVVQAGGSLRLSCAASGSIASIHAMGWFRQAPGKEREFVAVITWSGGITYYADSVKGRFTISRDNAKNTVYLQMNSLKPEDTALYYCAGDKHQSSWYDYWGQGTLVTVSS

SEQ ID NO: 490 - protein, 119 aa, synthetic construct
  REGION 1..119: note = Artificial polymer
EVQLVESGGGVVQAGGSLRLSCAASGSIASIHAMGWFRQAPGKEREFVAVITWSGGITYYADSVKGRFTISRDNAKNTVYLQMNSLKPEDTALYYCAGDKHQSSWYDYWGQGTLVKVSS

SEQ ID NO: 491 - protein, 119 aa, synthetic construct
  REGION 1..119: note = Artificial polymer
EVQLVESGGGVVQAGGSLRLSCAASGSIASIHAMGWFRQAPGKEREFVAVITWSGGITYYADSVKGRFTISRDNAKNTVYLQMNSLKPEDTALYYCAGDKHQSSWYDYWGQGTLVQVSS

SEQ ID NO: 492 - protein, 119 aa, synthetic construct
  REGION 1..119: note = Artificial polymer
EVQLVESGGGVVQAGGSLRLSCAASGSIASIHAMGWFRQAPGKEREFVAVITWSGGITYYADSVKGRFTISRDNAKNTVYLQMNSLKPEDTALYYCAGDKHQSSWYDYWGQGTLVTVKS

SEQ ID NO: 493 - protein, 119 aa, synthetic construct
  REGION 1..119: note = Artificial polymer
EVQLVESGGGVVQAGGSLRLSCAASGSIASIHAMGWFRQAPGKEREFVAVITWSGGITYYADSVKGRFTISRDNAKNTVYLQMNSLKPEDTALYYCAGDKHQSSWYDYWGQGTLVTVQS

SEQ ID NO: 494 - protein, 119 aa, synthetic construct
  REGION 1..119: note = Artificial polymer
EVQLVESGGGVVQPGGSLRLSCAASGSIASIHAMGWFRQAPGKEREFVAVITWSGGITYYADSVKGRFTISRDNSKNTVYLQMNSLRPEDTALYYCAGDKHQSSWYDYWGQGTLVTVSS

SEQ ID NO: 495 - protein, 119 aa, synthetic construct; identical to SEQ ID NO: 466
  REGION 1..119: note = Artificial polymer

SEQ ID NO: 496 - protein, 120 aa, synthetic construct
  REGION 1..120: note = Artificial polymer
EVQLVESGGGLVQAGGSLRLSCAASGSIASIHAMGWFRQAPGKEREFVAVITWSGGITYYADSVKGRFTISRDNAKNTVYLQMNSLKPEDTATYYCAGDKHQSSWYDYWGQGTLVTVSSA

SEQ ID NO: 497 - protein, 120 aa, synthetic construct
  REGION 1..120: note = Artificial polymer
EVQLVESGGGVVQAGGSLRLSCAASGSIASIHAMGWFRQAPGKEREFVAVITWSGGITYYADSVKGRFTISRDNAKNTVYLQMNSLKPEDTAIYYCAGDKHQSSWYDYWGQGTLVKVSSA

SEQ ID NO: 498 - protein, 120 aa, synthetic construct
  REGION 1..120: note = Artificial polymer
EVQLVESGGGVVQAGGSLRLSCAASGSIASIHAMGWFRQAPGKEREFVAVITWSGGITYYADSVKGRFTISRDNAKNTVYLQMNSLKPEDTAIYYCAGDKHQSSWYDYWGQGTLVQVSSA

SEQ ID NO: 499 - protein, 120 aa, synthetic construct
  REGION 1..120: note = Artificial polymer
EVQLVESGGGVVQAGGSLRLSCAASGSIASIHAMGWFRQAPGKEREFVAVITWSGGITYYADSVKGRFTISRDNAKNTVYLQMNSLKPEDTAIYYCAGDKHQSSWYDYWGQGTLVTVKSA

SEQ ID NO: 500 - protein, 121 aa, synthetic construct
  REGION 1..121: note = Artificial polymer
EVQLVESGGGVVQAGGSLRLSCAASGSIASIHATVCWFRQAPGKEREFVAVITWSGGITYYADSVKGRFTISRDNAKNTVYLQMNSLKPEDTAIYYCAGDKHQSSWYDYWGQGTLVTVQSA

SEQ ID NO: 501 - protein, 121 aa, synthetic construct
  REGION 1..121: note = Artificial polymer
EVQLVESGGGLVQAGGSLRLSCAASGSIASIHATVCWFRQAPGKEREFVAVITWSGGITYYADSVKGRFTISRDNAKNTVYLQMNSLKPEDTALYYCAGDKHQSSWYDYWGQGTLVKVSSA

SEQ ID NO: 502 - protein, 120 aa, synthetic construct
  REGION 1..120: note = Artificial polymer
EVQLVESGGGLVQAGGSLRLSCAASGSIASIHAMGWFRQAPGKEREFVAVITWSGGITYYADSVKGRFTISRDNAKNTVYLQMNSLKPEDTALYYCAGDKHQSSWYDYWGQGTLVQVSSA

SEQ ID NO: 503 - protein, 120 aa, synthetic construct
  REGION 1..120: note = Artificial polymer
EVQLVESGGGLVQAGGSLRLSCAASGSIASIHAMGWFRQAPGKEREFVAVITWSGGITYYADSVKGRFTISRDNAKNTVYLQMNSLKPEDTALYYCAGDKHQSSWYDYWGQGTLVTVKSA

SEQ ID NO: 504 - protein, 120 aa, synthetic construct
  REGION 1..120: note = Artificial polymer
EVQLVESGGGLVQAGGSLRLSCAASGSIASIHAMGWFRQAPGKEREFVAVITWSGGITYYADSVKGRFTISRDNAKNTVYLQMNSLKPEDTALYYCAGDKHQSSWYDYWGQGTLVTVQSA

SEQ ID NO: 505 - protein, 120 aa, synthetic construct
  REGION 1..120: note = Artificial polymer
EVQLVESGGGVVQAGGSLRLSCAASGSIASIHAMGWFRQAPGKEREFVAVITWSGGITYYADSVKGRFTISRDNAKNTVYLQMNSLKPEDTALYYCAGDKHQSSWYDYWGQGTLVTVSSA

SEQ ID NO: 506 - protein, 120 aa, synthetic construct
  REGION 1..120: note = Artificial polymer
EVQLVESGGGVVQAGGSLRLSCAASGSIASIHAMGWFRQAPGKEREFVAVITWSGGITYYADSVKGRFTISRDNAKNTVYLQMNSLKPEDTALYYCAGDKHQSSWYDYWGQGTLVKVSSA

SEQ ID NO: 507 - protein, 120 aa, synthetic construct
  REGION 1..120: note = Artificial polymer
EVQLVESGGGVVQAGGSLRLSCAASGSIASIHAMGWFRQAPGKEREFVAVITWSGGITYYADSVKGRFTISRDNAKNTVYLQMNSLKPEDTALYYCAGDKHQSSWYDYWGQGTLVQVSSA

SEQ ID NO: 508 - protein, 120 aa, synthetic construct
  REGION 1..120: note = Artificial polymer
EVQLVESGGGVVQAGGSLRLSCAASGSIASIHAMGWFRQAPGKEREFVAVITWSGGITYYADSVKGRFTISRDNAKNTVYLQMNSLKPEDTALYYCAGDKHQSSWYDYWGQGTLVTVKSA

SEQ ID NO: 509 - protein, 120 aa, synthetic construct
  REGION 1..120: note = Artificial polymer
EVQLVESGGGVVQAGGSLRLSCAASGSIASIHAMGWFRQAPGKEREFVAVITWSGGITYYADSVKGRFTISRDNAKNTVYLQMNSLKPEDTALYYCAGDKHQSSWYDYWGQGTLVTVQSA

SEQ ID NO: 510 - protein, 120 aa, synthetic construct
  REGION 1..120: note = Artificial polymer
EVQLVESGGGVVQPGGSLRLSCAASGSIASIHAMGWFRQAPGKEREFVAVITWSGGITYYADSVKGRFTISRDNSKNTVYLQMNSLRPEDTALYYCAGDKHQSSWYDYWGQGTLVTVSSA

SEQ ID NO: 511 - protein, 120 aa, synthetic construct
  REGION 1..120: note = Artificial polymer
DVQLVESGGGVVQPGGSLRLSCAASGSIASIHAMGWFRQAPGKEREFVAVITWSGGITYYADSVKGRFTISRDNSKNTVYLQMNSLRPEDTALYYCAGDKHQSSWYDYWGQGTLVTVSSA

SEQ ID NO: 512 - protein, 119 aa, synthetic construct
  REGION 1..119: note = Artificial polymer
DVQLVESGGGVVQPGGSLRLSCAASGSIASIHAMGWFRQAPGKEREFVAIITWSGGITYYADSVKGRFTISRDNSKNTVYLQMNSLRPEDTALYYCAGDKHQSSWYDYWGQGTLVTVSS

SEQ ID NO: 513 - protein, 119 aa, synthetic construct
  REGION 1..119: note = Artificial polymer
EVQLVESGGGLVQPGGSLRLSCAASGSIASIHAMGWFRQAPGKEREFVAVITWSGGITYYADSVKGRFTISRDNSKNTVYLQMNSLRPEDTAIYYCAGDKHQSSWYDYWGQGTLVTVSS

SEQ ID NO: 514 - protein, 119 aa, synthetic construct; identical to SEQ ID NO: 494
  REGION 1..119: note = Artificial polymer

SEQ ID NO: 515 - protein, 270 aa, synthetic construct
  REGION 1..270: note = Artificial polymer
DVQLVESGGGVVQPGGSLRLSCAASGSIASIHAMGWFRQAPGKEREFVAVITWSGGITYYADSVKGRFTISRDNSKNTVYLQMNSLRPEDTALYYCAGDKHQSSWYDYWGQGTLVTVSSGGGGSGGGGSGGGGSGGGGSGGGGSGGGGSGGGGSEVQLVESGGGVVQPGNSLRLSCAASGFTFSSFGMSWVRQAPGKGLEWVSSISGSGSDTLYADSVKGRFTISRDNAKTTLYLQMNSLRPEDTALYYCTIGGSLSRSSQGTLVTVSSA

SEQ ID NO: 516 - protein, 424 aa, synthetic construct
  REGION 1..424: note = Artificial polymer
DVQLVESGGGVVQPGGSLRLSCAASGSIASIHAMGWFRQAPGKEREFVAVITWSGGITYYADSVKGRFTISRDNSKNTVYLQMNSLRPEDTALYYCAGDKHQSSWYDYWGQGTLVTVSSGGGGSGGGGSGGGGSGGGGSGGGGSGGGGSGGGGSEVQLVESGGGVVQPGGSLRLSCAASGSIASIHAMGWFRQAPGKEREFVAVITWSGGITYYADSVKGRFTISRDNSKNTVYLQMNSLRPEDTALYYCAGDKHQSSWYDYWGQGTLVTVSSGGGGSGGGGSGGGGSGGGGSGGGGSGGGGSGGGGSEVQLVESGGGVVQPGNSLRLSCAASGFTFSSFGMSWVRQAPGKGLEWVSSISGSGSDTLYADSVKGRFTISRDNAKTTLYLQMNSLRPEDTALYYCTIGGSLSRSSQGTLVTVSSA

SEQ ID NO: 517 - protein, 119 aa, synthetic construct
  REGION 1..119: note = Artificial polymer
DVQLVESGGGVVQPGGSLRLSCAASGSIASIHAMGWFRQAPGKEREFVAVITVSGGITYYADSVKGRFTISRDNSKNTVYLQMNSLRPEDTALYYCAGDKHQSSFYDYWGQGTLVTVSS

SEQ ID NO: 518 - protein, 119 aa, synthetic construct; identical to SEQ ID NO: 472
  REGION 1..119: note = Artificial polymer

SEQ ID NO: 519 - protein, 119 aa, synthetic construct; identical to SEQ ID NO: 473
  REGION 1..119: note = Artificial polymer

SEQ ID NO: 520 - protein, 290 aa, synthetic construct
  REGION 1..290: note = Artificial polymer
MRIFAVFIFMTYWHLLNAFTVTVPKDLYVVEYGSNMTIECKFPVEKQLDLAALIVYWEMEDKNIIQFVHGEEDLKVQHSSYRQRARLLKDQLSLGNAALQITDVKLQDAGVYRCMISYGGADYKRITVKVNAPYNKINQRILVVDPVTSEHELTCQAEGYPKAEVIWTSSDHQVLSGKTTTTNSKREEKLFNVTSTLRINTTTNEIFYCTFRRLDPEENHTAELVIPELPLAHPPNERTHLVILGAILLCLGVALTFIFRLRKGRMMDVKKCGIQDTNSKKQSDTHLEET

SEQ ID NO: 521 - protein, 176 aa, synthetic construct
  REGION 1..176: note = Artificial polymer
MRIFAVFIFMTYWHLLNAPYNKINQRILVVDPVTSEHELTCQAEGYPKAEVIWTSSDHQVLSGKTTTTNSKREEKLFNVTSTLRINTTTNEIFYCTFRRLDPEENHTAELVIPELPLAHPPNERTHLVILGAILLCLGVALTFIFRLRKGRMMDVKKCGIQDTNSKKQSDTHLEET

SEQ ID NO: 522 - protein, 178 aa, synthetic construct
  REGION 1..178: note = Artificial polymer
MRIFAVFIFMTYWHLLNAFTVTVPKDLYVVEYGSNMTIECKFPVEKQLDLAALIVYWEMEDKNIIQFVHGEEDLKVQHSSYRQRARLLKDQLSLGNAALQITDVKLQDAGVYRCMISYGGADYKRITVKVNAPYNKINQRILVVDPVTSEHELTCQAEGYPKAEVIWTSSDHQVLSGD

SEQ ID NO: 523 - protein, 10 aa, synthetic construct
  REGION 1..10: note = Artificial polymer
GFTLDYYAIG

SEQ ID NO: 524 - protein, 10 aa, synthetic construct
  REGION 1..10: note = Artificial polymer
GTIFSINHMD

SEQ ID NO: 525 - protein, 10 aa, synthetic construct
  REGION 1..10: note = Artificial polymer
GFTFDDYGMS

SEQ ID NO: 526 - protein, 10 aa, synthetic construct
  REGION 1..10: note = Artificial polymer
GFTLDYYAIN

SEQ ID NO: 527 - protein, 10 aa, synthetic construct
  REGION 1..10: note = Artificial polymer
GTIFSINRMD

SEQ ID NO: 528 - protein, 10 aa, synthetic construct
  REGION 1..10: note = Artificial polymer
GFTFSSYGMS

SEQ ID NO: 529 - protein, 10 aa, synthetic construct
  REGION 1..10: note = Artificial polymer
GKIFSGNDMG

SEQ ID NO: 530 - protein, 10 aa, synthetic construct
  REGION 1..10: note = Artificial polymer
GTIFSINRMD

SEQ ID NO: 531 - protein, 10 aa, synthetic construct
  REGION 1..10: note = Artificial polymer
GFTFSSYGMS

SEQ ID NO: 532 - protein, 10 aa, synthetic construct
  REGION 1..10: note = Artificial polymer
GFTFNDYAMS

SEQ ID NO: 533 - protein, 10 aa, synthetic construct
  REGION 1..10: note = Artificial polymer
GFNLDPYAIA

SEQ ID NO: 534 - protein, 10 aa, synthetic construct
  REGION 1..10: note = Artificial polymer
GFTFTAYAMS

SEQ ID NO: 535 - protein, 10 aa, synthetic construct
  REGION 1..10: note = Artificial polymer
GFTFDYYAIG

SEQ ID NO: 536 - protein, 10 aa, synthetic construct
  REGION 1..10: note = Artificial polymer
GFNLDPYAIA

SEQ ID NO: 537 - protein, 10 aa, synthetic construct
  REGION 1..10: note = Artificial polymer
GTIFSINRMD

SEQ ID NO: 538 - protein, 10 aa, synthetic construct
  REGION 1..10: note = Artificial polymer
GTIFSINRMD

SEQ ID NO: 539 - protein, 10 aa, synthetic construct
  REGION 1..10: note = Artificial polymer
GFTFSSYGMS

SEQ ID NO: 540 - protein, 10 aa, synthetic construct
  REGION 1..10: note = Artificial polymer
GFNLDPYAIG

SEQ ID NO: 541 - protein, 10 aa, synthetic construct
  REGION 1..10: note = Artificial polymer
GFNLDPYAIA

SEQ ID NO: 542 - protein, 10 aa, synthetic construct
  REGION 1..10: note = Artificial polymer
ESIFSIEAMG

SEQ ID NO: 543 - protein, 10 aa, synthetic construct
  REGION 1..10: note = Artificial polymer
GKIFSGNDMG

SEQ ID NO: 544 - protein, 10 aa, synthetic construct
  REGION 1..10: note = Artificial polymer
GFTLDYYAIG

SEQ ID NO: 545 - protein, 10 aa, synthetic construct
  REGION 1..10: note = Artificial polymer
GFTFSSYGMS

SEQ ID NO: 546 - protein, 10 aa, synthetic construct
  REGION 1..10: note = Artificial polymer
GTIFSINRMD

SEQ ID NO: 547 - protein, 10 aa, synthetic construct
  REGION 1..10: note = Artificial polymer
GFTFSSYGMS

SEQ ID NO: 548 - protein, 10 aa, synthetic construct
  REGION 1..10: note = Artificial polymer
GFNLDPYAIA

SEQ ID NO: 549 - protein, 10 aa, synthetic construct
  REGION 1..10: note = Artificial polymer
GRTFSISAMG

SEQ ID NO: 550 - protein, 10 aa, synthetic construct
  REGION 1..10: note = Artificial polymer
GFTLDYYAIN

SEQ ID NO: 551 - protein, 10 aa, synthetic construct
  REGION 1..10: note = Artificial polymer
GFTFSSYGMS

SEQ ID NO: 552 - protein, 10 aa, synthetic construct
  REGION 1..10: note = Artificial polymer
GFTFNDYAMS

SEQ ID NO: 553 - protein, 10 aa, synthetic construct
  REGION 1..10: note = Artificial polymer
GFTLDYYAIG

SEQ ID NO: 554 - protein, 5 aa, synthetic construct
  REGION 1..5: note = Artificial polymer
YYAIG

SEQ ID NO: 555 - protein, 5 aa, synthetic construct
  REGION 1..5: note = Artificial polymer
YYAKC

SEQ ID NO: 556 - protein, 5 aa, synthetic construct
  REGION 1..5: note = Artificial polymer
QYDVG

SEQ ID NO: 557 - protein, 5 aa, synthetic construct
  REGION 1..5: note = Artificial polymer
NSAMG

SEQ ID NO: 558 - protein, 5 aa, synthetic construct
  REGION 1..5: note = Artificial polymer
DSIVS

SEQ ID NO: 559 - protein, 5 aa, synthetic construct
  REGION 1..5: note = Artificial polymer
INHMD

SEQ ID NO: 560 - protein, 5 aa, synthetic construct
  REGION 1..5: note = Artificial polymer
DYGMS

SEQ ID NO: 561 - protein, 5 aa, synthetic construct
  REGION 1..5: note = Artificial polymer
YYAIN

SEQ ID NO: 562 - protein, 5 aa, synthetic construct
  REGION 1..5: note = Artificial polymer
INRMD

SEQ ID NO: 563 - protein, 5 aa, synthetic construct
  REGION 1..5: note = Artificial polymer
SYGMS

SEQ ID NO: 564 - protein, 5 aa, synthetic construct
  REGION 1..5: note = Artificial polymer
GNDMG

SEQ ID NO: 565 - protein, 5 aa, synthetic construct
  REGION 1..5: note = Artificial polymer
DYAMS

SEQ ID NO: 566 - protein, 5 aa, synthetic construct
  REGION 1..5: note = Artificial polymer
PYAIA

SEQ ID NO: 567 - protein, 5 aa, synthetic construct
  REGION 1..5: note = Artificial polymer
AYAMS

SEQ ID NO: 568 - protein, 5 aa, synthetic construct
  REGION 1..5: note = Artificial polymer
PYAIG

SEQ ID NO: 569 - protein, 5 aa, synthetic construct
  REGION 1..5: note = Artificial polymer
IEAMG

SEQ ID NO: 570 - protein, 5 aa, synthetic construct
  REGION 1..5: note = Artificial polymer
ISAMG

SEQ ID NO: 571 - protein, 9 aa, synthetic construct
  REGION 1..9: note = Artificial polymer
ISSSDGSTY

SEQ ID NO: 572 - protein, 8 aa, synthetic construct
  REGION 1..8: note = Artificial polymer
ITSDGFPT

SEQ ID NO: 573 - protein, 9 aa, synthetic construct
  REGION 1..9: note = Artificial polymer
IRWNGGSTN

SEQ ID NO: 574 - protein, 9 aa, synthetic construct
  REGION 1..9: note = Artificial polymer
ISSSDGSTY

SEQ ID NO: 575 - protein, 8 aa, synthetic construct
  REGION 1..8: note = Artificial polymer
ITSDGTPT

SEQ ID NO: 576 - protein, 9 aa, synthetic construct
  REGION 1..9: note = Artificial polymer
IDSGGGSTS

SEQ ID NO: 577 - protein, 8 aa, synthetic construct
  REGION 1..8: note = Artificial polymer
ITSGGITD

SEQ ID NO: 578 - protein, 8 aa, synthetic construct
  REGION 1..8: note = Artificial polymer
ITSDGTPT

SEQ ID NO: 579 - protein, 9 aa, synthetic construct
  REGION 1..9: note = Artificial polymer
IDSGGGSTS

SEQ ID NO: 580 - protein, 9 aa, synthetic construct
  REGION 1..9: note = Artificial polymer
IRSNGGYTN

SEQ ID NO: 581 - protein, 9 aa, synthetic construct
  REGION 1..9: note = Artificial polymer
ISSSDVGTY

SEQ ID NO: 582 - protein, 9 aa, synthetic construct
  REGION 1..9: note = Artificial polymer
INSSDGSTY

SEQ ID NO: 583 - protein, 9 aa, synthetic construct
  REGION 1..9: note = Artificial polymer
ISGSDSSTY

SEQ ID NO: 584 - protein, 9 aa, synthetic construct
  REGION 1..9: note = Artificial polymer
ISSSDVGTY

SEQ ID NO: 585 - protein, 8 aa, synthetic construct
  REGION 1..8: note = Artificial polymer
ITSDGTPT

SEQ ID NO: 586 - protein, 8 aa, synthetic construct
  REGION 1..8: note = Artificial polymer
ITSDGTPA

SEQ ID NO: 587 - protein, 9 aa, synthetic construct
  REGION 1..9: note = Artificial polymer
IDSGGGSTS

SEQ ID NO: 588 - protein, 9 aa, synthetic construct
  REGION 1..9: note = Artificial polymer
ISSGDGSKY

SEQ ID NO: 589 - protein, 9 aa, synthetic construct
  REGION 1..9: note = Artificial polymer
ISSSDVGTY

SEQ ID NO: 590 - protein, 8 aa, synthetic construct
  REGION 1..8: note = Artificial polymer
IFGGGFTN

SEQ ID NO: 591 - protein, 8 aa, synthetic construct
  REGION 1..8: note = Artificial polymer
ITSGGITD

SEQ ID NO: 592 - protein, 9 aa, synthetic construct
  REGION 1..9: note = Artificial polymer
ISSSDGSTY

SEQ ID NO: 593 - protein, 9 aa, synthetic construct
  REGION 1..9: note = Artificial polymer
IDSGGGSTS

SEQ ID NO: 594 - protein, 8 aa, synthetic construct
  REGION 1..8: note = Artificial polymer
ITSDGTPT

SEQ ID NO: 595 - protein, 9 aa, synthetic construct
  REGION 1..9: note = Artificial polymer
IDSGGGSTS

SEQ ID NO: 596 - protein, 9 aa, synthetic construct
  REGION 1..9: note = Artificial polymer
ISSSDVGTY

SEQ ID NO: 597 - protein, 9 aa, synthetic construct
  REGION 1..9: note = Artificial polymer
ITWSGGSTS

SEQ ID NO: 598 - protein, 9 aa, synthetic construct
  REGION 1..9: note = Artificial polymer
ISSSDGSTY

SEQ ID NO: 599 - protein, 9 aa, synthetic construct
  REGION 1..9: note = Artificial polymer
IDSGGGSTS

SEQ ID NO: 600 - protein, 9 aa, synthetic construct
  REGION 1..9: note = Artificial polymer
IRSNGGYTN

SEQ ID NO: 601 - protein, 9 aa, synthetic construct
  REGION 1..9: note = Artificial polymer
ISSSDGSTY

SEQ ID NO: 602 - protein, 17 aa, synthetic construct
  REGION 1..17: note = Artificial polymer
SISSSDGSTYYADSVKG

SEQ ID NO: 603 - protein, 17 aa, synthetic construct
  REGION 1..17: note = Artificial polymer
CISSSDGSTYYADSVKG

SEQ ID NO: 604 - protein, 17 aa, synthetic construct
  REGION 1..17: note = Artificial polymer
CISGGDNSTYYADSVKG

SEQ ID NO: 605 - protein, 16 aa, synthetic construct
  REGION 1..16: note = Artificial polymer
FSSSGGRTIYPDSVKG

SEQ ID NO: 606 - protein, 16 aa, synthetic construct
  REGION 1..16: note = Artificial polymer
RITGGGLIAYTDSVKG

SEQ ID NO: 607 - protein, 16 aa, synthetic construct
  REGION 1..16: note = Artificial polymer
GISNGGTIKYAESVLG

SEQ ID NO: 608 - protein, 9 aa, synthetic construct
  REGION 1..9: note = Artificial polymer
LITSDGFPT

SEQ ID NO: 609 - protein, 16 aa, synthetic construct
  REGION 1..16: note = Artificial polymer
LITSDGFPTYADSAKG

SEQ ID NO: 610 - protein, 10 aa, synthetic construct
  REGION 1..10: note = Artificial polymer
AIRWNGGSTN

SEQ ID NO: 611 - protein, 17 aa, synthetic construct
  REGION 1..17: note = Artificial polymer
AIRWNGGSTNYADSVKG

SEQ ID NO: 612 - protein, 9 aa, synthetic construct
  REGION 1..9: note = Artificial polymer
LITSDGTPT

SEQ ID NO: 613 - protein, 16 aa, synthetic construct
  REGION 1..16: note = Artificial polymer
LITSDGTPTYADSAKG

SEQ ID NO: 614 - protein, 10 aa, synthetic construct
  REGION 1..10: note = Artificial polymer
AIDSGGGSTS

SEQ ID NO: 615 - protein, 17 aa, synthetic construct
  REGION 1..17: note = Artificial polymer
AIDSGGGSTSYADSVKG

SEQ ID NO: 616 - protein, 9 aa, synthetic construct
  REGION 1..9: note = Artificial polymer
IITSGGITD

SEQ ID NO: 617 - protein, 16 aa, synthetic construct
  REGION 1..16: note = Artificial polymer
IITSGGITDYADAVKG

SEQ ID NO: 618 - protein, 10 aa, synthetic construct
  REGION 1..10: note = Artificial polymer
GIRSNGGYTN

SEQ ID NO: 619 - protein, 17 aa, synthetic construct
  REGION 1..17: note = Artificial polymer
GIRSNGGYTNYADSVKG

SEQ ID NO: 620 - protein, 10 aa, synthetic construct
  REGION 1..10: note = Artificial polymer
CISSSDVGTY

SEQ ID NO: 621 - protein, 17 aa, synthetic construct
  REGION 1..17: note = Artificial polymer
CISSSDVGTYYADSVKG

SEQ ID NO: 622 - protein, 10 aa, synthetic construct
  REGION 1..10: note = Artificial polymer
CINSSDGSTY

SEQ ID NO: 623 - protein, 17 aa, synthetic construct
  REGION 1..17: note = Artificial polymer
CINSSDGSTYYADSVKG

SEQ ID NO: 624 - protein, 10 aa, synthetic construct
  REGION 1..10: note = Artificial polymer
CISGSDSSTY

SEQ ID NO: 625 - protein, 17 aa, synthetic construct
  REGION 1..17: note = Artificial polymer
CISGSDSSTYYADSVKG

SEQ ID NO: 626 - protein, 9 aa, synthetic construct
  REGION 1..9: note = Artificial polymer
LITSDGTPA

SEQ ID NO: 627 - protein, 16 aa, synthetic construct
  REGION 1..16: note = Artificial polymer
LITSDGTPAYADSAKG

SEQ ID NO: 628 - protein, 10 aa, synthetic construct
  REGION 1..10: note = Artificial polymer
CISSGDGSKY

SEQ ID NO: 629 - protein, 17 aa, synthetic construct
  REGION 1..17: note = Artificial polymer
CISSGDGSKYYADSVKG

SEQ ID NO: 630 - protein, 9 aa, synthetic construct
  REGION 1..9: note = Artificial polymer
AIFGGGFTN

SEQ ID NO: 631 - protein, 16 aa, synthetic construct
  REGION 1..16: note = Artificial polymer
AIFGGGFTNYADSVKG

SEQ ID NO: 632 - protein, 10 aa, synthetic construct
  REGION 1..10: note = Artificial polymer
AITWSGGSTS

SEQ ID NO: 633 - protein, 17 aa, synthetic construct
  REGION 1..17: note = Artificial polymer
AITWSGGSTSYTDSVKG

SEQ ID NO: 634 - protein, 16 aa, synthetic construct
  REGION 1..16: note = Artificial polymer
DGWSSCRHGINEYLYW

SEQ ID NO: 635 - protein, 8 aa, synthetic construct
  REGION 1..8: note = Artificial polymer
SSGVYNYW

SEQ ID NO: 636 - protein, 12 aa, synthetic construct
  REGION 1..12: note = Artificial polymer
QGYYCSGYGCPR

SEQ ID NO: 637 - protein, 17 aa, synthetic construct
  REGION 1..17: note = Artificial polymer
SGWRLCRPTDEYDYSYW

SEQ ID NO: 638 - protein, 8 aa, synthetic construct
  REGION 1..8: note = Artificial polymer
SSGVYNYW

SEQ ID NO: 639 - protein, 14 aa, synthetic construct
  REGION 1..14: note = Artificial polymer
QGYYCSGYGCSDYW

SEQ ID NO: 640 - protein, 7 aa, synthetic construct
  REGION 1..7: note = Artificial polymer
RDRTIWW

SEQ ID NO: 641 - protein, 8 aa, synthetic construct
  REGION 1..8: note = Artificial polymer
SSGVYNYW

SEQ ID NO: 642 - protein, 14 aa, synthetic construct
  REGION 1..14: note = Artificial polymer
QGYYCSGYGCSDYW

SEQ ID NO: 643 - protein, 12 aa, synthetic construct
  REGION 1..12: note = Artificial polymer
QGYYCSGYGCYP

SEQ ID NO: 644 - protein, 15 aa, synthetic construct
  REGION 1..15: note = Artificial polymer
DGYYYCSDYPHPLYW

SEQ ID NO: 645 - protein, 15 aa, synthetic construct
  REGION 1..15: note = Artificial polymer
DGWRDCTWSNEYAYW

SEQ ID NO: 646 - protein, 15 aa, synthetic construct
  REGION 1..15: note = Artificial polymer
TGWRTCRGLNEYDYW

SEQ ID NO: 647 - protein, 15 aa, synthetic construct
  REGION 1..15: note = Artificial polymer
DGYYYCSDYPHPLYW

SEQ ID NO: 648 - protein, 8 aa, synthetic construct
  REGION 1..8: note = Artificial polymer
SSGVYNYW

SEQ ID NO: 649 - protein, 8 aa, synthetic construct
  REGION 1..8: note = Artificial polymer
SSGVYNYW

SEQ ID NO: 650 - protein, 14 aa, synthetic construct
  REGION 1..14: note = Artificial polymer
QGYYCSGYGCSDYW

SEQ ID NO: 651 - protein, 15 aa, synthetic construct
  REGION 1..15: note = Artificial polymer
DGYYYCSDYPHPLYW

SEQ ID NO: 652 - protein, 15 aa, synthetic construct
  REGION 1..15: note = Artificial polymer
DGYYYCSDYPHPLYW

SEQ ID NO: 653 - protein, 13 aa, synthetic construct
  REGION 1..13: note = Artificial polymer
DLVSGSSRLYDYW

SEQ ID NO: 654 - protein, 7 aa, synthetic construct
  REGION 1..7: note = Artificial polymer
RDRTIWW

SEQ ID NO: 655 - protein, 16 aa, synthetic construct
  REGION 1..16: note = Artificial polymer
DGWSSCRHGINEYLYW

SEQ ID NO: 656 - protein, 14 aa, synthetic construct
  REGION 1..14: note = Artificial polymer
QGYYCSGYGCSDYW

SEQ ID NO: 657 - protein, 8 aa, synthetic construct
  REGION 1..8: note = Artificial polymer
SSGVYNYW

SEQ ID NO: 658 - protein, 14 aa, synthetic construct
  REGION 1..14: note = Artificial polymer
QGYYCSGYGCSDYW

SEQ ID NO: 659 - protein, 15 aa, synthetic construct
  REGION 1..15: note = Artificial polymer
DGYYYCSDYPHPLYW

SEQ ID NO: 660 - protein, 18 aa, synthetic construct
  REGION 1..18: note = Artificial polymer
MGRTNYGVIYDPNMYNYW

SEQ ID NO: 661 - protein, 17 aa, synthetic construct
  REGION 1..17: note = Artificial polymer
SGWRLCRPTDEYDYLYW

SEQ ID NO: 662 - protein, 14 aa, synthetic construct
  REGION 1..14: note = Artificial polymer
QGYYCSGYGCSDYW

SEQ ID NO: 663 - protein, 12 aa, synthetic construct
  REGION 1..12: note = Artificial polymer
QGYYCSGYGCYP

SEQ ID NO: 664 - protein, 16 aa, synthetic construct
  REGION 1..16: note = Artificial polymer
DGWSSCRHGINEYLYW

SEQ ID NO: 665 - protein, 17 aa, synthetic construct
  REGION 1..17: note = Artificial polymer
SQAPITIATMMKPFYDY

SEQ ID NO: 666 - protein, 14 aa, synthetic construct
  REGION 1..14: note = Artificial polymer
RHGGPLTVEYFFDY

SEQ ID NO: 667 - protein, 15 aa, synthetic construct
  REGION 1..15: note = Artificial polymer
GGWKYCSGYDPEYIY

SEQ ID NO: 668 - protein, 7 aa, synthetic construct
  REGION 1..7: note = Artificial polymer
DWYLNSY

SEQ ID NO: 669 - protein, 6 aa, synthetic construct
  REGION 1..6: note = Artificial polymer
INSRDG

SEQ ID NO: 670 - protein, 109 aa, synthetic construct
  REGION 1..109: note = Artificial polymer
QVQLQESGGGLVQAGGSLRLSCAASGFTLDYYAIGWFRQAPGKEREEVSCISSSDGSTYYADSVKGRFTISRDNAKNTVNLQMNSLKPEDTAVYYCATDGWSSCRHGIN

SEQ ID NO: 671 - protein, 134 aa, synthetic construct
  REGION 1..134: note = Artificial polymer
QVQLQESGGGLVQAGGSLRLSCTASGTIFSINHMDWFRQAPGKQRELVALITSDGFPTYADSAKGRFTISRDNTKKTVSLQMNSLKPEDTAVYYCHVSSGVYNYWGQGTQVTVSSAAAYPYDVPDYGSHHHHHH

SEQ ID NO: 672 - protein, 138 aa, synthetic construct
  REGION 1..138: note = Artificial polymer
QVQLQESGGGLVQPGGSLRLSCAASGFTFDDYGMSWVRQAPGKGLEWVSAIRWNGGSTNYADSVKGRFTISRDNAKNTLYLQMNSLKSEDTAVYYCAQGYYCSGYGCPRGQGTQVTVSSAAAYPYDVPDYGSHHHHHH

SEQ ID NO: 673 - protein, 144 aa, synthetic construct
  REGION 1..144: note = Artificial polymer
QVQLQESGGGLVQPGGSLRLSCAASGFTLDYYAINWFRQAPGKEREEVSCISSSDGSTYYADSVKGRFTISRDNAKNTVYLQMNSLKPEDTAVYYCATSGWRLCRPTDEYDYSYWGQGTQVTVSSAAAYPYDVPDYGSHHHHHH

SEQ ID NO: 674 - protein, 134 aa, synthetic construct
  REGION 1..134: note = Artificial polymer
QVQLQESGGGVVQAGGSLRLSCTASGTIFSINRMDWFRQAPGKQRELVALITSDGTPTYADSAKGRFTISRDNTKKTVSLQMNSLKPEDTAVYYCHVSSGVYNYWGQGTQVTVSSAAAYPYDVPDYGSHHHHHH

SEQ ID NO: 675 - protein, 140 aa, synthetic construct
  REGION 1..140: note = Artificial polymer
QVQLQESGGGLVQTGGSLRLSCAASGFTFSSYGMSWVRQTPGKGPEWVSAIDSGGGSTSYADSVKGRFTISRDNAKNTLYLQMNSLKPEDTAVYYCAQGYYCSGYGCSDYWGQGTQVTVSSAAAYPYDVPDYGSHHHHHH

SEQ ID NO: 676 - protein, 133 aa, synthetic construct
  REGION 1..133: note = Artificial polymer
QVQLQESGGGLVQPGGSLRLSCAASGKIFSGNDMGWYRQAPGKQRELVGIITSGGITDYADAVKGRFTISRDNAKNMMYLQMNSLKPEDTAVYYCNMRDRTIWWGQGTQVTVSSAAAYPYDVPDYGSHHHHHH

SEQ ID NO: 677 - protein, 134 aa, synthetic construct
  REGION 1..134: note = Artificial polymer
QVQLQESGGGSVQAGGSLRLSCTASGTIFSINRMDWFRQAPGKQRELVALITSDGTPTYADSAKGRFTISRDNTKKTVSLQMNSLKPEDTAVYYCHVSSGVYNYWGQGTQVTVSSAAAYPYDVPDYGSHHHHHH

SEQ ID NO: 678 - protein, 140 aa, synthetic construct
  REGION 1..140: note = Artificial polymer
QVQLQESGGGLVQPGGSLRLSCAASGFTFSSYGMSWVRQTPGKGPEWVSAIDSGGGSTSYADSVKGRFTTSRDNAKNTLYLQMNSLKPEDTAVYYCAQGYYCSGYGCSDYWGQGTQVTVSSAAAYPYDVPDYGSHHHHHH

SEQ ID NO: 679 - protein, 138 aa, synthetic construct
  REGION 1..138: note = Artificial polymer
QVQLQESGGGLVQPGGSLRLSCAASGFTFNDYAMSWVRQAPGKGLEWVSGIRSNGGYTNYADSVKGRFTISRDNAKNTLYLQMNSLKSEDTAVYYCAQGYYCSGYGCYPGQGTQVTVSSAAAYPYDVPDYGSHHHHHH

SEQ ID NO: 680 - protein, 142 aa, synthetic construct
  REGION 1..142: note = Artificial polymer
QVQLQESGGGLVQAGGSLRLSCAASGFNLDPYAIAWFRQAPGKEREEVSCISSSDVGTYYADSVKGRFTISRDNAKKTVYLQMNSLKPEDTAVYYCATDGYYYCSDYPHPLYWGQGTQVTVSSAAAYPYDVPDYGSHHHHHH

SEQ ID NO: 681 - protein, 142 aa, synthetic construct
  REGION 1..142: note = Artificial polymer
QVQLQESGGGLVQPGGSLRLSCAASGFTFTAYAMSWFRQAPGKEREEVSCINSSDGSTYYADSVKGRFTISRDNAKNTVYLQMNSLKPEDTAVYHCATDGWRDCTWSNEYAYWGQGTQVTVSSAAAYPYDVPDYGSHHHHHH

SEQ ID NO: 682 - protein, 142 aa, synthetic construct
  REGION 1..142: note = Artificial polymer
QVQLQESGGGLVQPGGSLRLSCAASGFTFDYYAIGWFRQAPGKEREEVSCISGSDSSTYYADSVKGRFTIVRDNAQNTVYLQMNSLKPEDTAIYYCAVTGWRTCRGLNEYDYWGQGTQVTVSSAAAYPYDVPDYGSHHHHHH

SEQ ID NO: 683 - protein, 142 aa, synthetic construct
  REGION 1..142: note = Artificial polymer
QVQLQESGGGLVQPGGSLRLSCAASGFNLDPYAIAWFRQAPGKEREEVSCISSSDVGTYYADSVKGRFTISRDNTKKTVYLQMNSLKPEDTAVYYCATDGYYYCSDYPHPLYWGQGTQVTVSSAAAYPYDVPDYGSHHHHHH

SEQ ID NO: 684 - protein, 134 aa, synthetic construct
  REGION 1..134: note = Artificial polymer
QVQLQESGGGLVQAGESLRLSCTASGTIFSINRMDWFRQAPGKQRELVALITSDGTPTYADSAKGRFTISRDNTKKTVSLQMNSLKPEDTAVYYCHVSSGVYNYWGQGTQVTVSSAAAYPYDVPDYGSHHHHHH

SEQ ID NO: 685 - protein, 134 aa, synthetic construct
  REGION 1..134: note = Artificial polymer
QVQLQESGGGLVQAGGSLRLSCTASGTIFSINRMDWFRQAPGKQRELVALITSDGTPAYADSAKGRFTISRDNTKKTVSLQMNSLKPEDTAVYYCHVSSGVYNYWGQGTQVTVSSAAAYPYDVPDYGSHHHHHH

SEQ ID NO: 686 - protein, 140 aa, synthetic construct
  REGION 1..140: note = Artificial polymer
QVQLQESGGGLVQSGGSLRLSCKTSGFTFSSYGMSWVRQTPGKGPEWVSAIDSGGGSTSYADSVKGRFTISRDNAKNTLYLQMNSLKPEDTAVYYCAQGYYCSGYGCSDYWGQGTQVTVSSAAAYPYDVPDYGSHHHHHH

SEQ ID NO: 687 - protein, 142 aa, synthetic construct
  REGION 1..142: note = Artificial polymer
QVQLQESGGGLVQPGGSLRLSCAASGFNLDPYAIGWFRQAPGKEREEVSCISSGDGSKYYADSVKGRFTMSRDNAKKTVYLQMNSLKPEDTAVYYCATDGYYYCSDYPHPLYWGQGTQVTVSSAAAYPYDVPDYGSHHHHHH

SEQ ID NO: 688 - protein, 142 aa, synthetic construct
  REGION 1..142: note = Artificial polymer
QVQLQESGGGLVQPGGSLRLSCAVSGFNLDPYAIAWFRQAPGKEREEVSCISSSDVGTYYADSVKGRFTISRDNAKKTVYLQMNSLKPEDTAVYYCATDGYYYCSDYPHPLYWGQGTQVTVSSAAAYPYDVPDYGSHHHHHH

SEQ ID NO: 689 - protein, 139 aa, synthetic construct
  REGION 1..139: note = Artificial polymer
QVQLQESGGGLVQAGGSLRLSCAASESIFSIEAMGWYRQAPGKQRELVAAIFGGGFTNYADSVKGRFTISRDNANRTVYLQMNSLKPEDTAVYYCNADLVSGSSRLYDYWGQGTQVTVSSAAAYPYDVPDYGSHHHHHH

SEQ ID NO: 690 - protein, 133 aa, synthetic construct
  REGION 1..133: note = Artificial polymer
QVQLQESGGGLVQAGGSLRLSCAASGKIFSGNDMGWYRQAPGKQRELVGIITSGGITDYADAVKGRFTISRDNAKNMMYLQMNSLKPEDTAVYYCNMRDRTIWWGQGTQVTVSSAAAYPYDVPDYGSHHHHHH

SEQ ID NO: 691 - protein, 143 aa, synthetic construct
  REGION 1..143: note = Artificial polymer
QVQLQESGGGLVQPGGSLRLSCAASGFTLDYYAIGWFRQAPGKEREEVSCISSSDGSTYYADSVKGRFTISRDNAKNTVNLQMNSLKPEDTAVYYCATDGWSSCRHGINEYLYWGQGTQVTVSSAAAYPYDVPDYGSHHHHHH

SEQ ID NO: 692 - protein, 101 aa, synthetic construct
  REGION 1..101: note = Artificial polymer
QVQLQESGGGLVQAGGSLRLSCAASGFTFSSYGMSWVRQTPGKGPEWVSAIDSGGGSTSYADSVKGRFTISRDNAKNTLYLQMNSLKPEDTAVYYCAQGYY

SEQ ID NO: 693 - protein, 134 aa, synthetic construct
  REGION 1..134: note = Artificial polymer
QVQLQESGGGLVQPGGSLRLSCTASGTIFSINRMDWFRQAPGKQRELVALITSDGTPTYADSAKGRFTISRDNTKKTVSLQMNSLKPEDTAVYYCHVSSGVYNYWGQGTQVTVSSAAAYPYDVPDYGSHHHHHH

SEQ ID NO: 694 - protein, 140 aa, synthetic construct
  REGION 1..140: note = Artificial polymer
QVQLQESGGGLVQPGGSLRLSCAASGFTFSSYGMSWVRQTPGKGPEWVSAIDSGGGSTSYADSVKGRFTISRDNAKNTLYLQMNSLKPEDTAVYYCAQGYYCSGYGCSDYWGQGTQVTVSSAAAYPYDVPDYGSHHHHHH

SEQ ID NO: 695 - protein, 142 aa, synthetic construct
  REGION 1..142: note = Artificial polymer
QVQLQESGGGLVQPGGSLRLSCAASGFNLDPYAIAWFRQAPGKEREEVSCISSSDVGTYYADSVKGRFTISRDNAKKTVYLQMNSLKPEDTAVYYCATDGYYYCSDYPHPLYWGQGTQVTVSSAAAYPYDVPDYGSHHHHHH

SEQ ID NO: 696 - protein, 145 aa, synthetic construct
  REGION 1..145: note = Artificial polymer
  SITE 13: note = misc_feature - Xaa can be any naturally occurring amino acid
QVQLQESGGGLVXAGGSLRLSCAASGRTFSISAMGWFRQAPGKEREFVAAITWSGGSTSYTDSVKGRFTISRDNAKNTLYLQMNSLKPEDTAIYYCAAMGRTNYGVIYDPNMYNYWGQGTQVTVSSAAAYPYDVPDYGSHHHHHH

SEQ ID NO: 697 - protein, 144 aa, synthetic construct
  REGION 1..144: note = Artificial polymer
QVQLQESGGGLVQPGGSLRLSCAASGFTLDYYAINWFRQAPGKEREEVSCISSSDGSTYYADSVKGRFTISRDNAKNTVYLQMNSLKPEDTAVYYCATSGWRLCRPTDEYDYLYWGQGTQVTVSSAAAYPYDVPDYGSHHHHHH

SEQ ID NO: 698 - protein, 140 aa, synthetic construct
  REGION 1..140: note = Artificial polymer
QVQLQESGGGLVQAGGSMRLSCAASGFTFSSYGMSWVRQTPGKGPEWVSAIDSGGGSTSYADSVKGRFTISRDNAKNTLYLQMNSLKPEDTAVYYCAQGYYCSGYGCSDYWGQGTQVTVSSAAAYPYDVPDYGSHHHHHH

SEQ ID NO: 699 - protein, 138 aa, synthetic construct
  REGION 1..138: note = Artificial polymer
QVQLQESGGGTVQAGGSLRLSCAASGFTFNDYAMSWVRQAPGKGLEWVSGIRSNGGYTNYADSVKGRFTISRDNAKNTLYLQMNSLKSEDTAVYYCAQGYYCSGYGCYPGQGTQVTVSSAAAYPYDVPDYGSHHHHHH

SEQ ID NO: 700 - protein, 143 aa, synthetic construct
  REGION 1..143: note = Artificial polymer
QVQLQESGGGLVQPGTSLRLSCAASGFTLDYYAIGWFRQAPGKEREEVSCISSSDGSTYYADSVKGRFTISRDNAKNTVNLQMNSLKPEDTAVYYCATDGWSSCRHGINEYLYWGQGTQVTVSSAAAYPYDVPDYGSHHHHHH

SEQ ID NO: 701 - protein, 5 aa, synthetic construct
  REGION 1..5: note = Artificial polymer
INAMG

SEQ ID NO: 702 - protein, 9 aa, synthetic construct
  REGION 1..9: note = Artificial polymer
NYVSNYAMG

SEQ ID NO: 703 - protein, 5 aa, synthetic construct
  REGION 1..5: note = Artificial polymer
  SITE 2: note = misc_feature - Xaa can be any naturally occurring amino acid
IXVMG

SEQ ID NO: 704 - protein, 5 aa, synthetic construct
  REGION 1..5: note = Artificial polymer
SGTMG

SEQ ID NO: 705 - protein, 5 aa, synthetic construct
  REGION 1..5: note = Artificial polymer
YYGIG

SEQ ID NO: 706 - protein, 5 aa, synthetic construct
  REGION 1..5: note = Artificial polymer
TYTMI

SEQ ID NO: 707 - protein, 5 aa, synthetic construct
  REGION 1..5: note = Artificial polymer
SYDMS

SEQ ID NO: 708 - protein, 16 aa, synthetic construct
  REGION 1..16: note = Artificial polymer
SISSGGSTNYADSVKG

SEQ ID NO: 709 - protein, 16 aa, synthetic construct
  REGION 1..16: note = Artificial polymer
SISNGDTINYADSVKG

SEQ ID NO: 710 - protein, 16 aa, synthetic construct
  REGION 1..16: note = Artificial polymer
AITSGGRTNYSDSVKG

SEQ ID NO: 711 - protein, 17 aa, synthetic construct
  REGION 1..17: note = Artificial polymer
SIPWSGGRTYYADSVKD

SEQ ID NO: 712 - protein, 17 aa, synthetic construct
  REGION 1..17: note = Artificial polymer
FISGSDGSTYYAESVKG

SEQ ID NO: 713 - protein, 16 aa, synthetic construct
  REGION 1..16: note = Artificial polymer
TIDKDGNTNYVDSVKG

SEQ ID NO: 714 - protein, 16 aa, synthetic construct
  REGION 1..16: note = Artificial polymer
TINSGGGITYRGSVKG

SEQ ID NO: 715 - protein, 22 aa, synthetic construct
  REGION 1..22: note = Artificial polymer
DVYPQDYGLGYVEGKVYYGMDY

SEQ ID NO: 716 - protein, 7 aa, synthetic construct
  REGION 1..7: note = Artificial polymer
HQVAGLT

SEQ ID NO: 717 - protein, 10 aa, synthetic construct
  REGION 1..10: note = Artificial polymer
WNSGYPPVDY

SEQ ID NO: 718 - protein, 11 aa, synthetic construct
  REGION 1..11: note = Artificial polymer
KERSTGWDFAS

SEQ ID NO: 719 - protein, 18 aa, synthetic construct
  REGION 1..18: note = Artificial polymer
DPWGPPSIATMTSYEYKH

SEQ ID NO: 720 - protein, 5 aa, synthetic construct
  REGION 1..5: note = Artificial polymer
HGSSA

SEQ ID NO: 721 - protein, 6 aa, synthetic construct
  REGION 1..6: note = Artificial polymer
GGSSYR

SEQ ID NO: 722 - protein, 241 aa, synthetic construct
  REGION 1..241: note = Artificial polymer
MHEEEIYTSLQWDSPAPDTYQKCLSSNKCSGACCLVMVISCVFCMGLLTASIFLGVKLLQVSTIAMQQQEKLIQQERALLNFTEWKRSCALQMKYCQAFMQNSLSSAHNSSPCPNNWIQNRESCYYVSEIWSIWHTSQENCLKEGSTLLQIESKEEMDFITGSLRKIKGSYDYWVGLSQDGHSGRWLWQDGSSPSPGLLPAERSQSANQVCGYVKSNSLLSSNCSTWKYFICEKYALRSSV

SEQ ID NO: 723 - protein, 10 aa, synthetic construct
  REGION 1..10: note = Artificial polymer
GSISSINVMG

SEQ ID NO: 724 - protein, 10 aa, synthetic construct
  REGION 1..10: note = Artificial polymer
GSFSSINVMG

SEQ ID NO: 725 - protein, 10 aa, synthetic construct
  REGION 1..10: note = Artificial polymer
GSISSINIMG

SEQ ID NO: 726 - protein, 10 aa, synthetic construct
  REGION 1..10: note = Artificial polymer
GSISSINIMG

SEQ ID NO: 727 - protein, 10 aa, synthetic construct
  REGION 1..10: note = Artificial polymer
VSIFSINAMG

SEQ ID NO: 728 - protein, 10 aa, synthetic construct
  REGION 1..10: note = Artificial polymer
GSIFSLNAMG

SEQ ID NO: 729 - protein, 10 aa, synthetic construct
  REGION 1..10: note = Artificial polymer
GRTISNYDMA

SEQ ID NO: 730 - protein, 10 aa, synthetic construct
  REGION 1..10: note = Artificial polymer
GRTFTTSLMQ

SEQ ID NO: 731 - protein, 10 aa, synthetic construct
  REGION 1..10: note = Artificial polymer
ERNLRIYDMA

SEQ ID NO: 732 - protein, 10 aa, synthetic construct
  REGION 1..10: note = Artificial polymer
ERNLRSYDMA

SEQ ID NO: 733 - protein, 10 aa, synthetic construct
  REGION 1..10: note = Artificial polymer
GLTFSNYHMG

SEQ ID NO: 734 - protein, 10 aa, synthetic construct
  REGION 1..10: note = Artificial polymer
GLTFSSYHMG

SEQ ID NO: 735 - protein, 10 aa, synthetic construct
  REGION 1..10: note = Artificial polymer
GLTFSRYHMG

SEQ ID NO: 736 - protein, 10 aa, synthetic construct
  REGION 1..10: note = Artificial polymer
GLTLSSYYIA

SEQ ID NO: 737 - protein, 10 aa, synthetic construct
  REGION 1..10: note = Artificial polymer
GLTFSSYYTG

SEQ ID NO: 738 - protein, 10 aa, synthetic construct
  REGION 1..10: note = Artificial polymer
GLTLSSYHMG

SEQ ID NO: 739 - protein, 10 aa, synthetic construct
  REGION 1..10: note = Artificial polymer
GRTSSPYVTG

SEQ ID NO: 740 - protein, 10 aa, synthetic construct
  REGION 1..10: note = Artificial polymer
GFTFSGYVMS

SEQ ID NO: 741 - protein, 10 aa, synthetic construct
  REGION 1..10: note = Artificial polymer
GFTFSGYVMT

SEQ ID NO: 742 - protein, 10 aa, synthetic construct
  REGION 1..10: note = Artificial polymer
GFTFSGYLMS

SEQ ID NO: 743 - protein, 10 aa, synthetic construct
  REGION 1..10: note = Artificial polymer
GRISSINSMG

SEQ ID NO: 744 - protein, 10 aa, synthetic construct
  REGION 1..10: note = Artificial polymer
GSITSINAMG

SEQ ID NO: 745 - protein, 10 aa, synthetic construct
  REGION 1..10: note = Artificial polymer
GRFFRVNAMG

SEQ ID NO: 746 - protein, 10 aa, synthetic construct
  REGION 1..10: note = Artificial polymer
GSSDSINAMG

SEQ ID NO: 747 - protein, 10 aa, synthetic construct
  REGION 1..10: note = Artificial polymer
GSVFSINAWG

SEQ ID NO: 748 - protein, 10 aa, synthetic construct
  REGION 1..10: note = Artificial polymer
GSILSINSMG

SEQ ID NO: 749 - protein, 10 aa, synthetic construct
  REGION 1..10: note = Artificial polymer
VSISSINSMG

SEQ ID NO: 750 - protein, 10 aa, synthetic construct
  REGION 1..10: note = Artificial polymer
GRVFSINAMG

SEQ ID NO: 751 - protein, 10 aa, synthetic construct
  REGION 1..10: note = Artificial polymer
VNIDTLNSMA

SEQ ID NO: 752 - protein, 10 aa, synthetic construct
  REGION 1..10: note = Artificial polymer
GGISSINSMG

SEQ ID NO: 753 - protein, 10 aa, synthetic construct
  REGION 1..10: note = Artificial polymer
GSMHSVNSMA

SEQ ID NO: 754 - protein, 10 aa, synthetic construct
  REGION 1..10: note = Artificial polymer
GDISSINAMG

SEQ ID NO: 755 - protein, 10 aa, synthetic construct
  REGION 1..10: note = Artificial polymer
GSIFSIDAMG

SEQ ID NO: 756 - protein, 10 aa, synthetic construct
  REGION 1..10: note = Artificial polymer
GSIFSINAMG

SEQ ID NO: 757 - protein, 10 aa, synthetic construct
  REGION 1..10: note = Artificial polymer
GSIFSIAAMG

SEQ ID NO: 758 - protein, 10 aa, synthetic construct
  REGION 1..10: note = Artificial polymer
GNIASITAMG

SEQ ID NO: 759 - protein, 10 aa, synthetic construct
  REGION 1..10: note = Artificial polymer
GFTFDDYAIG

SEQ ID NO: 760 - protein, 10 aa, synthetic construct
  REGION 1..10: note = Artificial polymer
GSISSINAMG

SEQ ID NO: 761 - protein, 10 aa, synthetic construct
  REGION 1..10: note = Artificial polymer
VSIFRSYFMG

SEQ ID NO: 762 - protein, 10 aa, synthetic construct
  REGION 1..10: note = Artificial polymer
GSIVSINAIG

SEQ ID NO: 763 - protein, 10 aa, synthetic construct
  REGION 1..10: note = Artificial polymer
GSIFSINAMG

SEQ ID NO: 764 - protein, 10 aa, synthetic construct
  REGION 1..10: note = Artificial polymer
RSFSSFNAMG

SEQ ID NO: 765 - protein, 10 aa, synthetic construct
  REGION 1..10: note = Artificial polymer
GSFSSINAMG

SEQ ID NO: 766 - protein, 10 aa, synthetic construct
  REGION 1..10: note = Artificial polymer
GTSFSINGMA

SEQ ID NO: 767 - protein, 10 aa, synthetic construct
  REGION 1..10: note = Artificial polymer
GRTFSTYAMG

SEQ ID NO: 768 - protein, 10 aa, synthetic construct
  REGION 1..10: note = Artificial polymer
GSIFSINAMG

SEQ ID NO: 769 - protein, 10 aa, synthetic construct
  REGION 1..10: note = Artificial polymer
GRIFDINAMG

SEQ ID NO: 770 - protein, 10 aa, synthetic construct
  REGION 1..10: note = Artificial polymer
GTLFSINGMA

SEQ ID NO: 771 - protein, 10 aa, synthetic construct
  REGION 1..10: note = Artificial polymer
GSIDSINAMG

SEQ ID NO: 772 - protein, 10 aa, synthetic construct
  REGION 1..10: note = Artificial polymer
GRAFSTNSMG

SEQ ID NO: 773 - protein, 10 aa, synthetic construct
  REGION 1..10: note = Artificial polymer
GSIISINSMG

SEQ ID NO: 774 - protein, 10 aa, synthetic construct
  REGION 1..10: note = Artificial polymer
RNFFSINAMG

SEQ ID NO: 775 - protein, 10 aa, synthetic construct
  REGION 1..10: note = Artificial polymer
GRFFRVNAMG

SEQ ID NO: 776 - protein, 10 aa, synthetic construct
  REGION 1..10: note = Artificial polymer
GSIVSINSMG

SEQ ID NO: 777 - protein, 10 aa, synthetic construct
  REGION 1..10: note = Artificial polymer
GSIFSINAMG

SEQ ID NO: 778 - protein, 10 aa, synthetic construct
  REGION 1..10: note = Artificial polymer
GSIIGINSMG

SEQ ID NO: 779 - protein, 10 aa, synthetic construct
  REGION 1..10: note = Artificial polymer
GRTFPGYVMA

SEQ ID NO: 780 - protein, 10 aa, synthetic construct
  REGION 1..10: note = Artificial polymer
GSIFSINAMG

SEQ ID NO: 781 - protein, 10 aa, synthetic construct
  REGION 1..10: note = Artificial polymer
GRTFSINAMG

SEQ ID NO: 782 - protein, 10 aa, synthetic construct
  REGION 1..10: note = Artificial polymer
GRTLSSYTIG

SEQ ID NO: 783 - protein, 10 aa, synthetic construct
  REGION 1..10: note = Artificial polymer
GSFFSINAMG

SEQ ID NO: 784 - protein, 10 aa, synthetic construct
  REGION 1..10: note = Artificial polymer
GSIFSINSMG

SEQ ID NO: 785 - protein, 10 aa, synthetic construct
  REGION 1..10: note = Artificial polymer
GSIFSFNAMG

SEQ ID NO: 786 - protein, 10 aa, synthetic construct
  REGION 1..10: note = Artificial polymer
GSIFSINAMG

SEQ ID NO: 787 - protein, 10 aa, synthetic construct
  REGION 1..10: note = Artificial polymer
GRTFSTYAMA

SEQ ID NO: 788 - protein, 10 aa, synthetic construct
  REGION 1..10: note = Artificial polymer
GSFFSINAMG

SEQ ID NO: 789 - protein, 10 aa, synthetic construct
  REGION 1..10: note = Artificial polymer
VNIGSLNSMV

SEQ ID NO: 790 - protein, 10 aa, synthetic construct
  REGION 1..10: note = Artificial polymer
GRTLSNYAVG

SEQ ID NO: 791 - protein, 10 aa, synthetic construct
  REGION 1..10: note = Artificial polymer
GSISSINAMG

SEQ ID NO: 792 - protein, 10 aa, synthetic construct
  REGION 1..10: note = Artificial polymer
GRFFRVNAMG

SEQ ID NO: 793 - protein, 10 aa, synthetic construct
  REGION 1..10: note = Artificial polymer
GSVFSINAMG

SEQ ID NO: 794 - protein, 10 aa, synthetic construct
  REGION 1..10: note = Artificial polymer
GSIFEINSIG

SEQ ID NO: 795 - protein, 10 aa, synthetic construct
  REGION 1..10: note = Artificial polymer
GSIFNINSMG

SEQ ID NO: 796 - protein, 10 aa, synthetic construct
  REGION 1..10: note = Artificial polymer
VNIGTLNSMA

SEQ ID NO: 797 - protein, 10 aa, synthetic construct
  REGION 1..10: note = Artificial polymer
GSIFSINSMG

SEQ ID NO: 798 - protein, 10 aa, synthetic construct
  REGION 1..10: note = Artificial polymer
GRIGSINSMG

SEQ ID NO: 799 - protein, 10 aa, synthetic construct
  REGION 1..10: note = Artificial polymer
GSIFSFNAMG

SEQ ID NO: 800 - protein, 10 aa, synthetic construct
  REGION 1..10: note = Artificial polymer
GRISSINSMG

SEQ ID NO: 801 - protein, 10 aa, synthetic construct
  REGION 1..10: note = Artificial polymer
GRTLSNYAVA

SEQ ID NO: 802 - protein, 10 aa, synthetic construct
  REGION 1..10: note = Artificial polymer
GRIGSINSMG

SEQ ID NO: 803 - protein, 10 aa, synthetic construct
  REGION 1..10: note = Artificial polymer
RSFFSFNAMG

SEQ ID NO: 804 - protein, 10 aa, synthetic construct
  REGION 1..10: note = Artificial polymer
GRFFRVNAMG

SEQ ID NO: 805 - protein, 10 aa, synthetic construct
  REGION 1..10: note = Artificial polymer
GIIFSINAMG

SEQ ID NO: 806 - protein, 10 aa, synthetic construct
  REGION 1..10: note = Artificial polymer
GRTLSNYAVA

SEQ ID NO: 807 - protein, 10 aa, synthetic construct
  REGION 1..10: note = Artificial polymer
GRIFSVNAMG

SEQ ID NO: 808 - protein, 10 aa, synthetic construct
  REGION 1..10: note = Artificial polymer
GRTFSSYAMA

SEQ ID NO: 809 - protein, 10 aa, synthetic construct
  REGION 1..10: note = Artificial polymer
GSFSSINVMG

SEQ ID NO: 810 - protein, 5 aa, synthetic construct
  REGION 1..5: note = Artificial polymer
INSMG

SEQ ID NO: 811 - protein, 5 aa, synthetic construct
  REGION 1..5: note = Artificial polymer
INAMG

SEQ ID NO: 812 - protein, 5 aa, synthetic construct
  REGION 1..5: note = Artificial polymer
VNAMG

SEQ ID NO: 813 - protein, 5 aa, synthetic construct
  REGION 1..5: note = Artificial polymer
INAWG

SEQ ID NO: 814 - protein, 5 aa, synthetic construct
  REGION 1..5: note = Artificial polymer
LNSMA

SEQ ID NO: 815 - protein, 5 aa, synthetic construct
  REGION 1..5: note = Artificial polymer
VNSMA

SEQ ID NO: 816 - protein, 5 aa, synthetic construct
  REGION 1..5: note = Artificial polymer
IDAMG

SEQ ID NO: 817 - protein, 5 aa, synthetic construct
  REGION 1..5: note = Artificial polymer
IAAMG

SEQ ID NO: 818 - protein, 6 aa, synthetic construct
  REGION 1..6: note = Artificial polymer
SITAMG

SEQ ID NO: 819 - protein, 5 aa, synthetic construct
  REGION 1..5: note = Artificial polymer
DYAIG

SEQ ID NO: 820 - protein, 5 aa, synthetic construct
  REGION 1..5: note = Artificial polymer
SYFMG

SEQ ID NO: 821 - protein, 5 aa, synthetic construct
  REGION 1..5: note = Artificial polymer
INAIG

SEQ ID NO: 822 - protein, 5 aa, synthetic construct
  REGION 1..5: note = Artificial polymer
FNAMG

SEQ ID NO: 823 - protein, 5 aa, synthetic construct
  REGION 1..5: note = Artificial polymer
INGMA

SEQ ID NO: 824 - protein, 5 aa, synthetic construct
  REGION 1..5: note = Artificial polymer
TYAMG

SEQ ID NO: 825 - protein, 5 aa, synthetic construct
  REGION 1..5: note = Artificial polymer
TNSMG

SEQ ID NO: 826 - protein, 5 aa, synthetic construct
  REGION 1..5: note = Artificial polymer
GYVMA

SEQ ID NO: 827 - protein, 5 aa, synthetic construct
  REGION 1..5: note = Artificial polymer
SYTIG

SEQ ID NO: 828 - protein, 5 aa, synthetic construct
  REGION 1..5: note = Artificial polymer
TYAMA

SEQ ID NO: 829 - protein, 5 aa, synthetic construct
  REGION 1..5: note = Artificial polymer
LNSMV

SEQ ID NO: 830 - protein, 5 aa, synthetic construct
  REGION 1..5: note = Artificial polymer
NYAVG

SEQ ID NO: 831 - protein, 5 aa, synthetic construct
  REGION 1..5: note = Artificial polymer
INSIG

SEQ ID NO: 832 - protein, 5 aa, synthetic construct
  REGION 1..5: note = Artificial polymer
NYAVA

SEQ ID NO: 833 - protein, 5 aa, synthetic construct
  REGION 1..5: note = Artificial polymer
SYAMA

SEQ ID NO: 834 - protein, 5 aa, synthetic construct
  REGION 1..5: note = Artificial polymer
INVMG

SEQ ID NO: 835 - protein, 16 aa, synthetic construct
  REGION 1..16: note = Artificial polymer
RITNLGLPNYADWLKD

SEQ ID NO: 836 - protein, 16 aa, synthetic construct
  REGION 1..16: note = Artificial polymer
RITNLGLPNYADSVTG

SEQ ID NO: 837 - protein, 16 aa, synthetic construct
  REGION 1..16: note = Artificial polymer
RITNIGLPNYADSVKG

SEQ ID NO: 838 - protein, 16 aa, synthetic construct
  REGION 1..16: note = Artificial polymer
RITNLGLPNYADSVEG

SEQ ID NO: 839 - protein, 16 aa, synthetic construct
  REGION 1..16: note = Artificial polymer
AITSGGRVVYSDSVKG

SEQ ID NO: 840 - protein, 16 aa, synthetic construct
  REGION 1..16: note = Artificial polymer
AITSGGRTAYADSVKG

SEQ ID NO: 841 - protein, 16 aa, synthetic construct
  REGION 1..16: note = Artificial polymer
HITSDGRIVYADPVKG

SEQ ID NO: 842 - protein, 17 aa, synthetic construct
  REGION 1..17: note = Artificial polymer
RISGSGDRTDYADSVKG

SEQ ID NO: 843 - protein, 17 aa, synthetic construct
  REGION 1..17: note = Artificial polymer
SITWSTGNTHYADSVKG

SEQ ID NO: 844 - protein, 17 aa, synthetic construct
  REGION 1..17: note = Artificial polymer
VISSSGDSTHYSDFVKG

SEQ ID NO: 845 - protein, 17 aa, synthetic construct
  REGION 1..17: note = Artificial polymer
VITSSGDSTHYSDFVKG

SEQ ID NO: 846 - protein, 17 aa, synthetic construct
  REGION 1..17: note = Artificial polymer
QITWSDASIYYAGSVKG

SEQ ID NO: 847 - protein, 17 aa, synthetic construct
  REGION 1..17: note = Artificial polymer
QITWSDTSIYYAGSVKG

SEQ ID NO: 848 - protein, 17 aa, synthetic construct
  REGION 1..17: note = Artificial polymer
QITWSDGTTYYPGSVKG

SEQ ID NO: 849 - protein, 17 aa, synthetic construct
  REGION 1..17: note = Artificial polymer
QIRWSDDSTYYPGSVKG

SEQ ID NO: 850 - protein, 17 aa, synthetic construct
  REGION 1..17: note = Artificial polymer
QISWSDDSTYYADSVKG

SEQ ID NO: 851 - protein, 16 aa, synthetic construct
  REGION 1..16: note = Artificial polymer
TVSWGGVTYYADSVKG

SEQ ID NO: 852 - protein, 17 aa, synthetic construct
  REGION 1..17: note = Artificial polymer
SIGSGGGYPSYTDSVEG

SEQ ID NO: 853 - protein, 17 aa, synthetic construct
  REGION 1..17: note = Artificial polymer
SIGSGGGYPSYTGSVEG

SEQ ID NO: 854 - protein, 17 aa, synthetic construct
  REGION 1..17: note = Artificial polymer
HIGSGGGYPSYTDSVQG

SEQ ID NO: 855 - protein, 17 aa, synthetic construct
  REGION 1..17: note = Artificial polymer
HIGSGGGHATYTDSVEG

SEQ ID NO: 856 - protein, 17 aa, synthetic construct
  REGION 1..17: note = Artificial polymer
TIGSGGGITSYADSVKG

SEQ ID NO: 857 - protein, 16 aa, synthetic construct
  REGION 1..16: note = Artificial polymer
AITNGGAKTYADSVKG

SEQ ID NO: 858 - protein, 16 aa, synthetic construct
  REGION 1..16: note = Artificial polymer
AITSGGRLSYADSVKG

SEQ ID NO: 859 - protein, 16 aa, synthetic construct
  REGION 1..16: note = Artificial polymer
AITNGGQTAYADSVKG

SEQ ID NO: 860 - protein, 16 aa, synthetic construct
  REGION 1..16: note = Artificial polymer
AITSGGRSTYIDSAKG

SEQ ID NO: 861 - protein, 16 aa, synthetic construct
  REGION 1..16: note = Artificial polymer
AITNQGRIAYAPSVNG

SEQ ID NO: 862 - protein, 16 aa, synthetic construct
  REGION 1..16: note = Artificial polymer
AITNDGRTTYVDSVKG

SEQ ID NO: 863 - protein, 16 aa, synthetic construct
  REGION 1..16: note = Artificial polymer
AVTVGGRYAYADSAKN

SEQ ID NO: 864 - protein, 16 aa, synthetic construct
  REGION 1..16: note = Artificial polymer
AITNQGATTYADSVKG

SEQ ID NO: 865 - protein, 16 aa, synthetic construct
  REGION 1..16: note = Artificial polymer
GITGSGQITYANSVRG

SEQ ID NO: 866 - protein, 16 aa, synthetic construct
  REGION 1..16: note = Artificial polymer
AITNGGRTVYGDSVKG

SEQ ID NO: 867 - protein, 16 aa, synthetic construct
  REGION 1..16: note = Artificial polymer
AITSGGRLAYAPSVNG

SEQ ID NO: 868 - protein, 16 aa, synthetic construct
  REGION 1..16: note = Artificial polymer
AITNGGRTTYVDSVKG

SEQ ID NO: 869 - protein, 16 aa, synthetic construct
  REGION 1..16: note = Artificial polymer
AITTGGRTTYVDSVKG

SEQ ID NO: 870 - protein, 16 aa, synthetic construct
  REGION 1..16: note = Artificial polymer
AITNQGRLTYADSVKG

SEQ ID NO: 871 - protein, 16 aa, synthetic construct
  REGION 1..16: note = Artificial polymer
AITSGGRRAYADSVKG

SEQ ID NO: 872 - protein, 18 aa, synthetic construct
  REGION 1..18: note = Artificial polymer
AITSASASRTTYADSVKG

SEQ ID NO: 873 - protein, 17 aa, synthetic construct
  REGION 1..17: note = Artificial polymer
CISRSDGSTYYDDSVKG

SEQ ID NO: 874 - protein, 16 aa, synthetic construct
  REGION 1..16: note = Artificial polymer
AITNQGRVTYADSVKG

SEQ ID NO: 875 - protein, 16 aa, synthetic construct
  REGION 1..16: note = Artificial polymer
AITDGGRLAYADSAKG

SEQ ID NO: 876 - protein, 16 aa, synthetic construct
  REGION 1..16: note = Artificial polymer
SITNQGIRNYSTSVMG

SEQ ID NO: 877 - protein, 16 aa, synthetic construct
  REGION 1..16: note = Artificial polymer
AITNQGRTTYADSVKG

SEQ ID NO: 878 - protein, 16 aa, synthetic construct
  REGION 1..16: note = Artificial polymer
AITNGGRIAYGIAVNG

SEQ ID NO: 879 - protein, 16 aa, synthetic construct
  REGION 1..16: note = Artificial polymer
AITNGGRIAYSDSAKG

SEQ ID NO: 880 - protein, 16 aa, synthetic construct
  REGION 1..16: note = Artificial polymer
GITSDGSTGYADSVKG

SEQ ID NO: 881 - protein, 17 aa, synthetic construct
  REGION 1..17: note = Artificial polymer
AISWSGGSTYYADSVKG

SEQ ID NO: 882 - protein, 16 aa, synthetic construct
  REGION 1..16: note = Artificial polymer
AITDQGRLAYADSAKG

SEQ ID NO: 883 - protein, 16 aa, synthetic construct
  REGION 1..16: note = Artificial polymer
AITNGGQTTYADSVKG

SEQ ID NO: 884 - protein, 16 aa, synthetic construct
  REGION 1..16: note = Artificial polymer
GITSDGSTGYADSVKG

SEQ ID NO: 885 - protein, 16 aa, synthetic construct
  REGION 1..16: note = Artificial polymer
AITTGGRTAYVDSVKG

SEQ ID NO: 886 - protein, 16 aa, synthetic construct
  REGION 1..16: note = Artificial polymer
AITSQGRITLADSVKG

SEQ ID NO: 887 - protein, 16 aa, synthetic construct
  REGION 1..16: note = Artificial polymer
AITVDGRLAYADSAKH

SEQ ID NO: 888 - protein, 16 aa, synthetic construct
  REGION 1..16: note = Artificial polymer
AITNGGRIAYGTSVMG

SEQ ID NO: 889 - protein, 16 aa, synthetic construct
  REGION 1..16: note = Artificial polymer
AITNGGQIAYADSVKG

SEQ ID NO: 890 - protein, 16 aa, synthetic construct
  REGION 1..16: note = Artificial polymer
AITDQGRTTYADSVKG

SEQ ID NO: 891 - protein, 16 aa, synthetic construct
  REGION 1..16: note = Artificial polymer
GITTQGRITYGNSVRG

SEQ ID NO: 892 - protein, 16 aa, synthetic construct
  REGION 1..16: note = Artificial polymer
AITSGGRTTYVDSVKG

SEQ ID NO: 893 - protein, 17 aa, synthetic construct
  REGION 1..17: note = Artificial polymer
AINWRGGDTYYADSVKG

SEQ ID NO: 894 - protein, 16 aa, synthetic construct
  REGION 1..16: note = Artificial polymer
AITDGGAKTYADSVKG

SEQ ID NO: 895 - protein, 16 aa, synthetic construct
  REGION 1..16: note = Artificial polymer
AITNQGRLSYVDSVKG

SEQ ID NO: 896 - protein, 16 aa, synthetic construct
  REGION 1..16: note = Artificial polymer
AITNQGRRTYADSVKG

SEQ ID NO: 897 - protein, 16 aa, synthetic construct
  REGION 1..16: note = Artificial polymer
AITNGGRIAYTDSVKG

SEQ ID NO: 898 - protein, 16 aa, synthetic construct
  REGION 1..16: note = Artificial polymer
AITNGGRTTYADSVKG

SEQ ID NO: 899 - protein, 16 aa, synthetic construct
  REGION 1..16: note = Artificial polymer
AITDGGRLTYADSAKG

SEQ ID NO: 900 - protein, 16 aa, synthetic construct
  REGION 1..16: note = Artificial polymer
AITTGGRTTYVDSVKG

SEQ ID NO: 901 - protein, 17 aa, synthetic construct
  REGION 1..17: note = Artificial polymer
AISWSGGSTEYHDSVKG

SEQ ID NO: 902 - protein, 16 aa, synthetic construct
  REGION 1..16: note = Artificial polymer
AITNQGRIAYADSVKG

SEQ ID NO: 903 - protein, 16 aa, synthetic construct
  REGION 1..16: note = Artificial polymer
GITGSGQITYANSVRG

SEQ ID NO: 904 - protein, 17 aa, synthetic construct
  REGION 1..17: note = Artificial polymer
AINWSSGGISYSNSAKG

SEQ ID NO: 905 - protein, 16 aa, synthetic construct
  REGION 1..16: note = Artificial polymer
AITGQGRTTYADSVKG

SEQ ID NO: 906 - protein, 16 aa, synthetic construct
  REGION 1..16: note = Artificial polymer
AITNGGQIVYADSVKG

SEQ ID NO: 907 - protein, 16 aa, synthetic construct
  REGION 1..16: note = Artificial polymer
AITTQGRTTYEDSVKG

SEQ ID NO: 908 - protein, 16 aa, synthetic construct
  REGION 1..16: note = Artificial polymer
AITSGGITNYANSVQG

SEQ ID NO: 909 - protein, 16 aa, synthetic construct
  REGION 1..16: note = Artificial polymer
AITVGGRLAYADSAKG

SEQ ID NO: 910 - protein, 16 aa, synthetic construct
  REGION 1..16: note = Artificial polymer
GITGGGQITYANSVRG

SEQ ID NO: 911 - protein, 16 aa, synthetic construct
  REGION 1..16: note = Artificial polymer
AITSQGRSTYADSAKG

SEQ ID NO: 912 - protein, 16 aa, synthetic construct
  REGION 1..16: note = Artificial polymer
AITNGGATVYADSVKG

SEQ ID NO: 913 - protein, 16 aa, synthetic construct
  REGION 1..16: note = Artificial polymer
AITDGGRLTYADSAKN

SEQ ID NO: 914 - protein, 16 aa, synthetic construct
  REGION 1..16: note = Artificial polymer
AITNGGAKTYADSVKG

SEQ ID NO: 915 - protein, 17 aa, synthetic construct
  REGION 1..17: note = Artificial polymer
AINWSSGGISYSNAAKG

SEQ ID NO: 916 - protein, 16 aa, synthetic construct
  REGION 1..16: note = Artificial polymer
AITNGGATVYADSVKG

SEQ ID NO: 917 - protein, 16 aa, synthetic construct
  REGION 1..16: note = Artificial polymer
AITNGGRIAYGTSVMG

SEQ ID NO: 918 - protein, 16 aa, synthetic construct
  REGION 1..16: note = Artificial polymer
AITNGGQTAYADSVKG

SEQ ID NO: 919 - protein, 16 aa, synthetic construct
  REGION 1..16: note = Artificial polymer
  SITE 5: note = misc_feature - Xaa can be any naturally occurring amino acid
AITNXGRTTYADSVKG

SEQ ID NO: 920 - protein, 17 aa, synthetic construct
  REGION 1..17: note = Artificial polymer
AIWWASGGISYANSAKG

SEQ ID NO: 921 - protein, 16 aa, synthetic construct
  REGION 1..16: note = Artificial polymer
AITNQGAPTYADSVKG

SEQ ID NO: 922 - protein, 16 aa, synthetic construct
  REGION 1..16: note = Artificial polymer
RITNLGLPNYADSVTG

SEQ ID NO: 923 - protein, 16 aa, synthetic construct
  REGION 1..16: note = Artificial polymer
RITNLGLPNYADSVKG

SEQ ID NO: 924 - protein, 9 aa, synthetic construct
  REGION 1..9: note = Artificial polymer
AITNGGAKT

SEQ ID NO: 925 - protein, 9 aa, synthetic construct
  REGION 1..9: note = Artificial polymer
AITSGGRLS

SEQ ID NO: 926 - protein, 9 aa, synthetic construct
  REGION 1..9: note = Artificial polymer
AITNGGQTA

SEQ ID NO: 927 - protein, 9 aa, synthetic construct
  REGION 1..9: note = Artificial polymer
AITSGGRST

SEQ ID NO: 928 - protein, 8 aa, synthetic construct
  REGION 1..8: note = Artificial polymer
ITNQGRIA

SEQ ID NO: 929 - protein, 15 aa, synthetic construct
  REGION 1..15: note = Artificial polymer
ITNQGRIAYAPSVNG

SEQ ID NO: 930 - protein, 9 aa, synthetic construct
  REGION 1..9: note = Artificial polymer
AITNDGRTT

SEQ ID NO: 931 - protein, 9 aa, synthetic construct
  REGION 1..9: note = Artificial polymer
AVTVGGRYA

SEQ ID NO: 932 - protein, 9 aa, synthetic construct
  REGION 1..9: note = Artificial polymer
AITNQGATT

SEQ ID NO: 933 - protein, 9 aa, synthetic construct
  REGION 1..9: note = Artificial polymer
GITGSGQIT

SEQ ID NO: 934 - protein, 9 aa, synthetic construct
  REGION 1..9: note = Artificial polymer
AITNGGRTV

SEQ ID NO: 935 - protein, 9 aa, synthetic construct
  REGION 1..9: note = Artificial polymer
AITSGGRLA

SEQ ID NO: 936 - protein, 9 aa, synthetic construct
  REGION 1..9: note = Artificial polymer
AITNGGRTT

SEQ ID NO: 937 - protein, 9 aa, synthetic construct
  REGION 1..9: note = Artificial polymer
AITTGGRTT

SEQ ID NO: 938 - protein, 9 aa, synthetic construct
  REGION 1..9: note = Artificial polymer
AITNQGRLT

SEQ ID NO: 939 - protein, 9 aa, synthetic construct
  REGION 1..9: note = Artificial polymer
AITSGGRRA

SEQ ID NO: 940 - protein, 11 aa, synthetic construct
  REGION 1..11: note = Artificial polymer
AITSASASRTT

SEQ ID NO: 941 - protein, 10 aa, synthetic construct
  REGION 1..10: note = Artificial polymer
CISRSDGSTY

SEQ ID NO: 942 - protein, 9 aa, synthetic construct
  REGION 1..9: note = Artificial polymer
AITNQGRVT

SEQ ID NO: 943 - protein, 9 aa, synthetic construct
  REGION 1..9: note = Artificial polymer
AITDGGRLA

SEQ ID NO: 944 - protein, 9 aa, synthetic construct
  REGION 1..9: note = Artificial polymer
SITNQGIRN

SEQ ID NO: 945 - protein, 9 aa, synthetic construct
  REGION 1..9: note = Artificial polymer
AITNQGRTT

SEQ ID NO: 946 - protein, 9 aa, synthetic construct
  REGION 1..9: note = Artificial polymer
AITNGGRIA

SEQ ID NO: 947 - protein, 9 aa, synthetic construct
  REGION 1..9: note = Artificial polymer
GITSDGSTG

SEQ ID NO: 948 - protein, 10 aa, synthetic construct
  REGION 1..10: note = Artificial polymer
AISWSGGSTY

SEQ ID NO: 949 - protein, 9 aa, synthetic construct
  REGION 1..9: note = Artificial polymer
AITDQGRLA

SEQ ID NO: 950 - protein, 9 aa, synthetic construct
  REGION 1..9: note = Artificial polymer
AITNGGQTT

SEQ ID NO: 951 - protein, 9 aa, synthetic construct
  REGION 1..9: note = Artificial polymer
AITTGGRTA

SEQ ID NO: 952 - protein, 9 aa, synthetic construct
  REGION 1..9: note = Artificial polymer
AITSQGRIT

SEQ ID NO: 953 - protein, 9 aa, synthetic construct
  REGION 1..9: note = Artificial polymer
AITVDGRLA

SEQ ID NO: 954 - protein, 9 aa, synthetic construct
  REGION 1..9: note = Artificial polymer
AITNGGQIA

SEQ ID NO: 955 - protein, 9 aa, synthetic construct
  REGION 1..9: note = Artificial polymer
AITDQGRTT

SEQ ID NO: 956 - protein, 9 aa, synthetic construct
  REGION 1..9: note = Artificial polymer
GITTQGRIT

SEQ ID NO: 957 - protein, 9 aa, synthetic construct
  REGION 1..9: note = Artificial polymer
AITSGGRTT

SEQ ID NO: 958 - protein, 10 aa, synthetic construct
  REGION 1..10: note = Artificial polymer
AINWRGGDTY

SEQ ID NO: 959 - protein, 9 aa, synthetic construct
  REGION 1..9: note = Artificial polymer
AITDGGAKT

SEQ ID NO: 960 - protein, 9 aa, synthetic construct
  REGION 1..9: note = Artificial polymer
AITNQGRLS

SEQ ID NO: 961 - protein, 9 aa, synthetic construct
  REGION 1..9: note = Artificial polymer
AITNQGRRT

SEQ ID NO: 962 - protein, 9 aa, synthetic construct
  REGION 1..9: note = Artificial polymer
AITDGGRLT

SEQ ID NO: 963 - protein, 10 aa, synthetic construct
  REGION 1..10: note = Artificial polymer
AISWSGGSTE

SEQ ID NO: 964 - protein, 9 aa, synthetic construct
  REGION 1..9: note = Artificial polymer
AITNQGRIA

SEQ ID NO: 965 - protein, 10 aa, synthetic construct
  REGION 1..10: note = Artificial polymer
AINWSSGGIS

SEQ ID NO: 966 - protein, 9 aa, synthetic construct
  REGION 1..9: note = Artificial polymer
AITGQGRTT

SEQ ID NO: 967 - protein, 9 aa, synthetic construct
  REGION 1..9: note = Artificial polymer
AITNGGQIV

SEQ ID NO: 968 - protein, 9 aa, synthetic construct
  REGION 1..9: note = Artificial polymer
AITTQGRTT

SEQ ID NO: 969 - protein, 9 aa, synthetic construct
  REGION 1..9: note = Artificial polymer
AITSGGITN

SEQ ID NO: 970 - protein, 9 aa, synthetic construct
  REGION 1..9: note = Artificial polymer
AITVGGRLA

SEQ ID NO: 971 - protein, 9 aa, synthetic construct
  REGION 1..9: note = Artificial polymer
GITGGGQIT

SEQ ID NO: 972 - protein, 9 aa, synthetic construct
  REGION 1..9: note = Artificial polymer
AITSQGRST

SEQ ID NO: 973 - protein, 9 aa, synthetic construct
  REGION 1..9: note = Artificial polymer
AITNGGATV

SEQ ID NO: 974 - protein, 9 aa, synthetic construct
  REGION 1..9: note = Artificial polymer
  SITE 5: note = misc_feature - Xaa can be any naturally occurring amino acid
AITNXGRTT

SEQ ID NO: 975 - protein, 10 aa, synthetic construct
  REGION 1..10: note = Artificial polymer
AIWWASGGIS

SEQ ID NO: 976 - protein, 9 aa, synthetic construct
  REGION 1..9: note = Artificial polymer
AITNQGAPT

SEQ ID NO: 977 - protein, 9 aa, synthetic construct
  REGION 1..9: note = Artificial polymer
RITNLGLPN

SEQ ID NO: 978 - protein, 7 aa, synthetic construct
  REGION 1..7: note = Artificial polymer
VALSAEY

SEQ ID NO: 979 - protein, 7 aa, synthetic construct
  REGION 1..7: note = Artificial polymer
VALKAEY

SEQ ID NO: 980 - protein, 7 aa, synthetic construct
  REGION 1..7: note = Artificial polymer
VGLKAEY

SEQ ID NO: 981 - protein, 13 aa, synthetic construct
  REGION 1..13: note = Artificial polymer
KTKSAVLFGGMDY

SEQ ID NO: 982 - protein, 7 aa, synthetic construct
  REGION 1..7: note = Artificial polymer
YIRGEDY

SEQ ID NO: 983 - protein, 7 aa, synthetic construct
  REGION 1..7: note = Artificial polymer
KHYASNY

SEQ ID NO: 984 - protein, 8 aa, synthetic construct
  REGION 1..8: note = Artificial polymer
QDFGSPSF

SEQ ID NO: 985 - protein, 8 aa, synthetic construct
  REGION 1..8: note = Artificial polymer
QDFRSPDF

SEQ ID NO: 986 - protein, 8 aa, synthetic construct
  REGION 1..8: note = Artificial polymer
QIFGSPNF

SEQ ID NO: 987 - protein, 7 aa, synthetic construct
  REGION 1..7: note = Artificial polymer
LAIHGDY

SEQ ID NO: 988 - protein, 7 aa, synthetic construct
  REGION 1..7: note = Artificial polymer
NQIRQWP

SEQ ID NO: 989 - protein, 7 aa, synthetic construct
  REGION 1..7: note = Artificial polymer
NSIRQWP

SEQ ID NO: 990 - protein, 7 aa, synthetic construct
  REGION 1..7: note = Artificial polymer
NAIRQWP

SEQ ID NO: 991 - protein, 8 aa, synthetic construct
  REGION 1..8: note = Artificial polymer
RKVGGPDY

SEQ ID NO: 992 - protein, 7 aa, synthetic construct
  REGION 1..7: note = Artificial polymer
NTFGNVY

SEQ ID NO: 993 - protein, 7 aa, synthetic construct
  REGION 1..7: note = Artificial polymer
FTRRDDY

SEQ ID NO: 994 - protein, 7 aa, synthetic construct
  REGION 1..7: note = Artificial polymer
FQSSGID

SEQ ID NO: 995 - protein, 8 aa, synthetic construct
  REGION 1..8: note = Artificial polymer
WAADYQQY

SEQ ID NO: 996 - protein, 8 aa, synthetic construct
  REGION 1..8: note = Artificial polymer
WNRDRQQY

SEQ ID NO: 997 - protein, 13 aa, synthetic construct
  REGION 1..13: note = Artificial polymer
KPTPVYGSTVGDY

SEQ ID NO: 998 - protein, 7 aa, synthetic construct
  REGION 1..7: note = Artificial polymer
FTRDKDY

SEQ ID NO: 999 - protein, 8 aa, synthetic construct
  REGION 1..8: note = Artificial polymer
WDRDRQQY

SEQ ID NO: 1000 - protein, 7 aa, synthetic construct
  REGION 1..7: note = Artificial polymer
FTRTDDY

SEQ ID NO: 1001 - protein, 8 aa, synthetic construct
  REGION 1..8: note = Artificial polymer
YDRSSTPY

SEQ ID NO: 1002 - protein, 7 aa, synthetic construct
  REGION 1..7: note = Artificial polymer
FTRGDDY

SEQ ID NO: 1003 - protein, 7 aa, synthetic construct
  REGION 1..7: note = Artificial polymer
LNSATTY

SEQ ID NO: 1004 - protein, 7 aa, synthetic construct
  REGION 1..7: note = Artificial polymer
YTRDEDY

SEQ ID NO: 1005 - protein, 7 aa, synthetic construct
  REGION 1..7: note = Artificial polymer
FTRDEDY

SEQ ID NO: 1006 - protein, 13 aa, synthetic construct
  REGION 1..13: note = Artificial polymer
KWYDPLVIEYYDN

SEQ ID NO: 1007 - protein, 7 aa, synthetic construct
  REGION 1..7: note = Artificial polymer
KADHNDY

SEQ ID NO: 1008 - protein, 8 aa, synthetic construct
  REGION 1..8: note = Artificial polymer
FRSGADDY

SEQ ID NO: 1009 - protein, 15 aa, synthetic construct
  REGION 1..15: note = Artificial polymer
EVPSTYSCSGFREDY

SEQ ID NO: 1010 - protein, 8 aa, synthetic construct
  REGION 1..8: note = Artificial polymer
FAASGMEY

SEQ ID NO: 1011 - protein, 8 aa, synthetic construct
  REGION 1..8: note = Artificial polymer
WTTDRQQY

SEQ ID NO: 1012 - protein, 9 aa, synthetic construct
  REGION 1..9: note = Artificial polymer
FAGWGKEDY

SEQ ID NO: 1013 - protein, 7 aa, synthetic construct
  REGION 1..7: note = Artificial polymer
FSPTGDY

SEQ ID NO: 1014 - protein, 13 aa, synthetic construct
  REGION 1..13: note = Artificial polymer
KPTPVYGSTVGDY

SEQ ID NO: 1015 - protein, 13 aa, synthetic construct
  REGION 1..13: note = Artificial polymer
KASPVYGSTVEDY

SEQ ID NO: 1016 - protein, 8 aa, synthetic construct
  REGION 1..8: note = Artificial polymer
STPRGDSY

SEQ ID NO: 1017 - protein, 15 aa, synthetic construct
  REGION 1..15: note = Artificial polymer
EAEGSGREGNFYERS

SEQ ID NO: 1018 - protein, 8 aa, synthetic construct
  REGION 1..8: note = Artificial polymer
WDRDRQQY

SEQ ID NO: 1019 - protein, 7 aa, synthetic construct
  REGION 1..7: note = Artificial polymer
FTRSDDY

SEQ ID NO: 1020 - protein, 8 aa, synthetic construct
  REGION 1..8: note = Artificial polymer
STPRGDSY

SEQ ID NO: 1021 - protein, 7 aa, synthetic construct
  REGION 1..7: note = Artificial polymer
FTRDTDY

SEQ ID NO: 1022 - protein, 7 aa, synthetic construct
  REGION 1..7: note = Artificial polymer
WTTLGTF

SEQ ID NO: 1023 - protein, 8 aa, synthetic construct
  REGION 1..8: note = Artificial polymer
WVRDGQQY

SEQ ID NO: 1024 - protein, 13 aa, synthetic construct
  REGION 1..13: note = Artificial polymer
KAIPVYGSTVEDY

SEQ ID NO: 1025 - protein, 13 aa, synthetic construct
  REGION 1..13: note = Artificial polymer
KAAATHLSTVADY

SEQ ID NO: 1026 - protein, 7 aa, synthetic construct
  REGION 1..7: note = Artificial polymer
FGRFDDY

SEQ ID NO: 1027 - protein, 14 aa, synthetic construct
  REGION 1..14: note = Artificial polymer
WGVKTGPESGSGTL

SEQ ID NO: 1028 - protein, 7 aa, synthetic construct
  REGION 1..7: note = Artificial polymer
FTRDEDY

SEQ ID NO: 1029 - protein, 10 aa, synthetic construct
  REGION 1..10: note = Artificial polymer
RLTTEYDYAY

SEQ ID NO: 1030 - protein, 7 aa, synthetic construct
  REGION 1..7: note = Artificial polymer
FTRGNDY

SEQ ID NO: 1031 - protein, 7 aa, synthetic construct
  REGION 1..7: note = Artificial polymer
FQSSGID

SEQ ID NO: 1032 - protein, 7 aa, synthetic construct
  REGION 1..7: note = Artificial polymer
FSPTDDF

SEQ ID NO: 1033 - protein, 13 aa, synthetic construct
  REGION 1..13: note = Artificial polymer
KAIPIYGSTAEDY

SEQ ID NO: 1034 - protein, 7 aa, synthetic construct
  REGION 1..7: note = Artificial polymer
FSLTDDY

SEQ ID NO: 1035 - protein, 8 aa, synthetic construct
  REGION 1..8: note = Artificial polymer
WTRDRQQY

SEQ ID NO: 1036 - protein, 7 aa, synthetic construct
  REGION 1..7: note = Artificial polymer
FTRDEDF

SEQ ID NO: 1037 - protein, 14 aa, synthetic construct
  REGION 1..14: note = Artificial polymer
EVEGSGREGNFYGA

SEQ ID NO: 1038 - protein, 5 aa, synthetic construct
  REGION 1..5: note = Artificial polymer
PGWDY

SEQ ID NO: 1039 - protein, 8 aa, synthetic construct
  REGION 1..8: note = Artificial polymer
YDRSATAY

SEQ ID NO: 1040 - protein, 11 aa, synthetic construct
  REGION 1..11: note = Artificial polymer
ASSVLSGTVDY

SEQ ID NO: 1041 - protein, 8 aa, synthetic construct
  REGION 1..8: note = Artificial polymer
FAADGMEY

SEQ ID NO: 1042 - protein, 13 aa, synthetic construct
  REGION 1..13: note = Artificial polymer
KAAASYVSTVADY

SEQ ID NO: 1043 - protein, 6 aa, synthetic construct
  REGION 1..6: note = Artificial polymer
TAKDDY

SEQ ID NO: 1044 - protein, 9 aa, synthetic construct
  REGION 1..9: note = Artificial polymer
FTGWGKEDY

SEQ ID NO: 1045 - protein, 8 aa, synthetic construct
  REGION 1..8: note = Artificial polymer
WAADYQQY

SEQ ID NO: 1046 - protein, 8 aa, synthetic construct
  REGION 1..8: note = Artificial polymer
YDRSATPY

SEQ ID NO: 1047 - protein, 8 aa, synthetic construct
  REGION 1..8: note = Artificial polymer
WARDRQQY

SEQ ID NO: 1048 - protein, 7 aa, synthetic construct
  REGION 1..7: note = Artificial polymer
FTRGDDY

SEQ ID NO: 1049 - protein, 8 aa, synthetic construct
  REGION 1..8: note = Artificial polymer
WTKDRQQY

SEQ ID NO: 1050 - protein, 7 aa, synthetic construct
  REGION 1..7: note = Artificial polymer
FTRTYDY

SEQ ID NO: 1051 - protein, 11 aa, synthetic construct
  REGION 1..11: note = Artificial polymer
ASSILSGTVDY

SEQ ID NO: 1052 - protein, 8 aa, synthetic construct
  REGION 1..8: note = Artificial polymer
WAADYQQY

SEQ ID NO: 1053 - protein, 13 aa, synthetic construct
  REGION 1..13: note = Artificial polymer
KPAPVYGSTVGDY

SEQ ID NO: 1054 - protein, 8 aa, synthetic construct
  REGION 1..8: note = Artificial polymer
FAADGMEY

SEQ ID NO: 1055 - protein, 6 aa, synthetic construct
  REGION 1..6: note = Artificial polymer
FGSGGG

SEQ ID NO: 1056 - protein, 11 aa, synthetic construct
  REGION 1..11: note = Artificial polymer
ASSVLSGTADY

SEQ ID NO: 1057 - protein, 7 aa, synthetic construct
  REGION 1..7: note = Artificial polymer
FTRGDDY

SEQ ID NO: 1058 - protein, 15 aa, synthetic construct
  REGION 1..15: note = Artificial polymer
EAEGSGREGNFYERS

SEQ ID NO: 1059 - protein, 115 aa, synthetic construct
  REGION 1..115: note = Artificial polymer
QVQLVESGGGLVHPGGSLRLSCAASGSISSINVMGWYRQAPGKERELVARITNLGLPNYADWLKDRFTISRDNAKNTVYLQMNSLKPEDTAVYYCYLVALSAEYWGQGTQVTVSS

SEQ ID NO: 1060 - protein, 115 aa, synthetic construct
  REGION 1..115: note = Artificial polymer
QVQLVESGGGLVHPGGSLRLSCAASGSFSSINVMGWYRQAPGKERELVARITNLGLPNYADSVTGRFTISRDNAKNTVYLQMNSLKPEDTAVYYCYLVALKAEYWGQGTQVTVSS

SEQ ID NO: 1061 - protein, 115 aa, synthetic construct
  REGION 1..115: note = Artificial polymer
QVQLVESGGGLVHRGGSLRLSCAASGSISSINIMGWYRQAPGKERELVARITNIGLPNYADSVKGRFTISRDNAKSTVYLQMNSLNAEDTAVYYCYLVALKAEYWGQGTQVTVSS

SEQ ID NO: 1062 - protein, 115 aa, synthetic construct
  REGION 1..115: note = Artificial polymer
QVQLVESGGGLVQPGGSLRLSCAASGSISSINVMGWYRQAPGKERELVARITNLGLPNYADSVEGRFTISRDKDENTVYLEMNTLKPEDTAVYYCYLVGLKAEYWGQGTQVTVSS

SEQ ID NO: 1063 - protein, 121 aa, synthetic construct
  REGION 1..121: note = Artificial polymer
QVQLVESGGGLVQPGGSLRLSCAASGSSDSINAMGWYRQAPGKERELVAAITSGGRVVYSDSVKGRGTISRDNAKNTVYLQIASLKPEDTAVYYCNVKTKSAVLFGGMDYWGKGTQVTVSS

SEQ ID NO: 1064 - protein, 115 aa, synthetic construct
  REGION 1..115: note = Artificial polymer
QVQLVESGGGLVQPGGSLRLSCAASVSIFSINAMGWYRQAPGKERELVAAITSGGRTAYADSVKGRFTISRDNSKNTVYLQMDSLKPEDTDVYYCKAYIRGEDYWGKGTQVTVSS

SEQ ID NO: 1065 - protein, 115 aa, synthetic construct
  REGION 1..115: note = Artificial polymer
DVQLVESGGGLVQPGGSLRLSCAASGSIFSLNAMGWYRQAPGKERELVAHITSDGRIVYADPVKGRFTISRVDGKNMVTLQMNSLKPEDTAVYYCNAKHYASNYWGQGTQVTVSS

SEQ ID NO: 1066 - protein, 117 aa, synthetic construct
  REGION 1..117: note = Artificial polymer
QVQLVESGGGSVQAGGSLRLSCAASGRTISNYDMAWSRQAPGKEREFVARISGSGDRTDYADSVKGRFTISRDNAKNTVYLQMNSLKPEDTAIYYCQIQDFGSPSFSGQGTQVTVSS

SEQ ID NO: 1067 - protein, 117 aa, synthetic construct
  REGION 1..117: note = Artificial polymer
DVQLVESGGGSVQAGGSLRLSCAASGRTISNYDMAWSRQAPGKEREFVARISGSGDRTDYADSVKGRFTISRDNAKNTVYLQMNSLKPEDTAIYYCQIQDFRSPDFWSQGTQVTVSS

SEQ ID NO: 1068 - protein, 117 aa, synthetic construct
  REGION 1..117: note = Artificial polymer
QVQLVESGGESVQAGGSLRLSCAASGRTISNYDMAWSRQAPGKEREFVARISGSGDRTDYADSVKGRFTISRDNAKNTVYLQMNSLKPEDTAIYNCQTQIFGSPNFSGQGTQVTVSS

SEQ ID NO: 1069 - protein, 116 aa, synthetic construct
  REGION 1..116: note = Artificial polymer
QVQLVESGGGLVQAGDSLRLSCAASGRTFTTSLMQWHRQAPGKEREFVASITWSTGNTHYADSVKGRFTISRDNARNTVYLQMNSLKPEDTAIYTCRVLAIHGDYWGQGTQVTVSS

SEQ ID NO: 1070 - protein, 116 aa, synthetic construct
  REGION 1..116: note = Artificial polymer
DVQLVESGGGLVQAGDSLRLSCAASERNLRIYDMAWYRQAPGKEREYVAVISSSGDSTHYSDFVKGRFTISRDNAKNTVSLQMDSLKPEDTAFYYCNVNQIRQWPWGQGTQVTVSS

SEQ ID NO: 1071 - protein, 116 aa, synthetic construct
  REGION 1..116: note = Artificial polymer
QVQLVESGGGLVQAGDSLRLSCAASERNLRIYDMAWYRQAPGKEREYVAVISSSGDSTHYSDFVKGRFTISRDNAKNTVSLQMDSLKPEDTAFYYCNVNSIRQWPWGQGTQVTVSS

SEQ ID NO: 1072 - protein, 116 aa, synthetic construct
  REGION 1..116: note = Artificial polymer
QVQLVESGGGLVQAGDSLRLSCTASERNLRSYDMAWWRQAPGKEREYVAVITSSGDSTHYSDFVKGRFTISRDNAKNTVSLQMDSLKPEDTASYYCNVNAIRQWPWGQGTQVTVSS

SEQ ID NO: 1073 - protein, 117 aa, synthetic construct
  REGION 1..117: note = Artificial polymer
DVQLVESGGGSVQAGGSLRLSCAISGLTFSNYHMGWYRQAPGREREFVAQITWSDASIYYAGSVKGRFTISRDNVKNIVYLQIDNLKPEDTAIYYCDARKVGGPDYWGQGTQVTVSS

SEQ ID NO: 1074 - protein, 117 aa, synthetic construct
  REGION 1..117: note = Artificial polymer
QVQLVESGGGLVQAGGSLTLSCAISGLTFSSYHMGWYRQAPGREREFVAQITWSDTSIYYAGSVKGRFTISRDNVKNIVYLQIDNLKPEDTAIYYCDARKVGGPDYWGQGTQVTVSS

SEQ ID NO: 1075 - protein, 117 aa, synthetic construct
  REGION 1..117: note = Artificial polymer
DVQLVESGGGLVQAGGSLRLSCAISGLTFSRYHMGWYRQAPGREREFVAQITWSDGTTYYPGSVKGRFTISRDNARNTVYLQIDNLKPEDTAIYYCDARKVGGPDYWGQGTQVTVSS

SEQ ID NO: 1076 - protein, 117 aa, synthetic construct
  REGION 1..117: note = Artificial polymer
QVQLVESGGGLVQAGGSLRLSCATSGLTLSSYYIAWYRQAPGREREFVAQIRWSDDSTYYPGSVKGRFTISRDNARNTVYLRMDNLKPEDTARYYCDARKVGGPDYWGQGTQVTVSS

SEQ ID NO: 1077 - protein, 117 aa, synthetic construct
  REGION 1..117: note = Artificial polymer
DVQLVESGGGLVQAGGSLRLSCATSGLTFSSYYTGWYRQAPGREREFVAQISWSDDSTYYADSVKGRFTISRDNARNTVYLQMNNLKPGDTAIYYCDARKVGGPDYWGQGTQVTVSS

SEQ ID NO: 1078 - protein, 117 aa, synthetic construct
  REGION 1..117: note = Artificial polymer
DVQLVESGGGLVQAGGSLRLSCATSGLTLSSYHMGWYRQAPGREREFVAQISWSDDSTYYADSVKGRFTISRDNARNTVYLQMNNLKPEDTAIYYCDARKVGGPDYWGQGTQVTVSS

SEQ ID NO: 1079 - protein, 115 aa, synthetic construct
  REGION 1..115: note = Artificial polymer
DVQLVESGGGLVQAGGSLRLSCAASGRTSSPYVTGWYRQTPGKEREPVATVSWGGVTYYADSVKGRFTISRDNAKNTVYLQMNALKPEDTAIYYCNVNTFGNVYWGQGTQVTVSS

SEQ ID NO: 1080 - protein, 112 aa, synthetic construct
  REGION 1..112: note = Artificial polymer
QVQLVESGGGLVQPGGSLRLSCAASGFTFSGYVMSWVRQAPGKGLEWVASIGSGGGYPSYTDSVEGRFTISRDNAKNTLYLLMDNLKPDDTAVYYCEMLGRRGQGTQVTVSS

SEQ ID NO: 1081 - protein, 112 aa, synthetic construct
  REGION 1..112: note = Artificial polymer
QVQLVESGGGLVQPGGSLRLSCAASGFTFSGYVMSWVRQAPGKGLEWVASIGSGGGYPSYTDSVEGRFTISRDNAKNTLYLQMNNLKPDDTAVYYCEMLGRRGQGTQVTVSS

SEQ ID NO: 1082 - protein, 112 aa, synthetic construct
  REGION 1..112: note = Artificial polymer
QVQLVESGGGLVQPGGSLRLSCAASGFTFSGYVMSWVRQAPGKGLEWVASIGSGGGYPSYTGSVEGRFTISRDNAKNTLYLLMNNLKPDDTAVYYCEMLGRRGQGTQVTVSS

SEQ ID NO: 1083 - protein, 112 aa, synthetic construct
  REGION 1..112: note = Artificial polymer
QVQLVESGGGLVQPGGSLRLSCAASGFTFSGYVMSWVRQAPGKGLEWVAHIGSGGGYPSYTDSVQGRFTISRDNAKNTLYLQMNNLKPEDTAVYYCEMLGRRGQGTQVTVSS

SEQ ID NO: 1084 - protein, 112 aa, synthetic construct
  REGION 1..112: note = Artificial polymer
QVQLVESGGGLVQPGGSLRLSCAASGFTFSGYVMTWVRQAPGKGLEWVAHIGSGGGHATYTDSVEGRFTISRDNAKNTLYLQMNNLKAEDTAVYYCEFLGRRGQGTQVTVSS

SEQ ID NO: 1085 - protein, 112 aa, synthetic construct
  REGION 1..112: note = Artificial polymer
QVQLVESGGGLVQPGGSLRLSCAASGFTFSGYLMSWVRQAPGKGLEWVATIGSGGGITSYADSVKGRFTISRDNAKNTLYLQMNNLKHEDTAVYYCETVIKRGQGTQVTVSS

SEQ ID NO: 1086 - protein, 134 aa, synthetic construct
  REGION 1..134: note = Artificial polymer
QVQLQESGGGLVQPGGSLRLSCAASGRISSINSMGWYRQAPGNQRELVAAITNGGAKTYADSVKGRFTISTDNAGNTVYLQMDSLRPEDTAVYYCKAFTRRDDYWGQGTQITVSSAAAYPYDVPDYGSHHHHHH

SEQ ID NO: 1087 - protein, 134 aa, synthetic construct
  REGION 1..134: note = Artificial polymer
QVQLQESGGGLVQAGGSLRLSCAASGSITSINAMGWYRQAPGKQRELVAAITSGGRLSYADSVKGRFTISRDNAESTVALQMNSLKPEDTAVYSCAAFQSSGIDWGQGTQVTVSSAAAYPYDVPDYGSHHHHHH

SEQ ID NO: 1088 - protein, 135 aa, synthetic construct
  REGION 1..135: note = Artificial polymer
QVQLQESGGGLVQPGGSLRLSCAASGRFFRVNAMGWYRQAPGKQRELVAAITNGGQTAYADSVKGRFTISKESARNTVHLQMSSLKPEDTAVYYCTIWAADYQQYWGQGTQVTVSSAAAYPYDVPDYGSHHHHHH

SEQ ID NO: 1089 - protein, 135 aa, synthetic construct
  REGION 1..135: note = Artificial polymer
QVQLQESGGGLVQAGESLRLSCAASGSSDSINAMGWYRQAPGKQRELVAAITSGGRSTYIDSAKGRATISRDNARNTAYLQMSSLKAEDTAVYYCTIWNRDRQQYWGQGTQVTVSSAAAYPYDVPDYGSHHHHHH

SEQ ID NO: 1090 - protein, 140 aa, synthetic construct
  REGION 1..140: note = Artificial polymer
QVQLQESGGGLVQSGGSLRLSCAASGSVFSINAWGWYRQAPGKQRELVAAITNQGRIAYAPSVNGRFTISRDSAKNTVYLQMNSLKPEDTAVYYCNAKPTPVYGSTVGDYWGQGTQVTVSSAAAYPYDVPDYGSHHHHHH

SEQ ID NO: 1091 - protein, 134 aa, synthetic construct
  REGION 1..134: note = Artificial polymer
QVQLQESGGGLVQAGGSLRLSCAASGSILSINSMGWYRPALGNQRELVAAITNDGRTTYVDSVKGRFTISRDNAKNTVYLQMNSLKPEDTAVYWCKAFTRDKDYWGQGTQVTVSSAAAYPYDVPDYGSHHHHHH

SEQ ID NO: 1092 - protein, 135 aa, synthetic construct
  REGION 1..135: note = Artificial polymer
  SITE 108: note = misc_feature - Xaa can be any naturally occurring amino acid
QVQLQESGGGLVQTGGSLRLSCAASVSISSINSMGWYRQAPGKERELVAAVTVGGRYAYADSAKNRFTISRDDAQNTVHLQMSSLRAEDTAVYYCTIWDRDRQQYWGXGTQVTVSSAAAYPYDVPDYGSHHHHHH

SEQ ID NO: 1093 - protein, 134 aa, synthetic construct
  REGION 1..134: note = Artificial polymer
QVQLQESGGGLVQPGGSLRLSCAASGRVFSINAMGWYRQAPGKQRELVAAITNQGATTYADSVKGRFTISRDTAGNTVYLQMNSLRPEDTAVHYCKAFTRTDDYWGQGTQVTVSSAAAYPYDVPDYGSHHHHHH

SEQ ID NO: 1094 - protein, 135 aa, synthetic construct
  REGION 1..135: note = Artificial polymer
QVQLQESGGGLVQAGGSLRLSCAASVNIDTLNSMAWYRQAPGKQRELVAGITGSGQITYANSVRGRFTVSRDNAKSTVYLQMNTLQPEDTAVYYCAAYDRSSTPYWGQGTQVTVSSAAAYPYDVPDYGSHHHHHH

SEQ ID NO: 1095 - protein, 134 aa, synthetic construct
  REGION 1..134: note = Artificial polymer
QVQLQESGGGLVQPGGSLRLSCAASGGISSINSMGWYRQAPGNQRELVAAITNGGRTVYGDSVKGRFTISRDSAGNTVHLQMDSLRPEDTGVYYCKAFTRGDDYWGQGTQVTVSSAAAYPYDVPDYGSHHHHHH

SEQ ID NO: 1096 - protein, 134 aa, synthetic construct
  REGION 1..134: note = Artificial polymer
QVQLQESGGGLVQPGGFLSLSCAASGSMHSVNSMAWYRQVPGKQRELVAAITSGGRLAYAPSVNGRFTISRDYAKNTIHLQMNSLEPEDTAVYYCAALNSATTYWGQGTQVTVSSAAAYPYDVPDYGSHHHHHH

SEQ ID NO: 1097 - protein, 134 aa, synthetic construct
  REGION 1..134: note = Artificial polymer
QVQLQESGGGLVQAGGSLRLSCAATGDISSINAMGWHRPARGNERELVAAITNGGRTTYVDSVKGRFTISRDNAKNTVYLQMNSLKPEDTAVYFCKAYTRDEDYWGQGTQVTVSSAAAYPYDVPDYGSHHHHHH

SEQ ID NO: 1098 - protein, 134 aa, synthetic construct
  REGION 1..134: note = Artificial polymer
QVQLQESGGGLVRAGGSLRLSCAASGSIFSIDAMGWYRPAHGEQRELVAAITTGGRTTYVDSVKGRFTISRDNAKNTVYLQMNSLKPEDTAVYFCKAFTRDEDYWGQGTQVTVSSAAAYPYDVPDYGSHHHHHH

SEQ ID NO: 1099 - protein, 140 aa, synthetic construct
  REGION 1..140: note = Artificial polymer
QVQLQESGGGLVQPGGSLRLSCAASGSIFSINAMGWYRQAPGKQRELVAAITNQGRLTYADSVKGRFTISRDNAKNTVFLQMDSLKPEDTAVYYCNAKWYDPLVIEYYDNWGQGTQVTVSSAAAYPYDVPDYGSHHHHHH

SEQ ID NO: 1100 - protein, 134 aa, synthetic construct
  REGION 1..134: note = Artificial polymer
QVQLQESGGGLVQPGGSLRLSCAASGSIFSIAAMGWYRQAPGKQRELVAAITSGGRRAYADSVKGRFTISRDNDENTVALQMNSLKPEDTDVYYCNAKADHNDYWGQGTQITVSSAAAYPYDVPDYGSHHHHHH

SEQ ID NO: 1101 - protein, 137 aa, synthetic construct
  REGION 1..137: note = Artificial polymer
QVQLQESGGGLVQPGGSLRLSCAAIGNIASITAMGWYRQAPGKQRELVAAITSASASRTTYADSVKGRFTISRDNAKNTVYLQMNSLQPEDTAVYYCKGFRSGADDYWGQGTQVTVSSAAAYPYDVPDYGSHHHHHH

SEQ ID NO: 1102 - protein, 143 aa, synthetic construct
  REGION 1..143: note = Artificial polymer
QVQLQESGGGLVQPGGSLRLSCAASGFTFDDYAIGWFRQAPGKEHEGVSCISRSDGSTYYDDSVKGRFTISSDNAKNTVYLQMNSLKPEDTAVYYCAAEVPSTYSCSGFREDYKGKGTQVTVSSAAAYPYDVPDYGSHHHHHH

SEQ ID NO: 1103 - protein, 135 aa, synthetic construct
  REGION 1..135: note = Artificial polymer
QVQLQESGGGLVQPGGSLRLSCAASGSISSINAMGWYRQAPGNQRELVAAITNQGRVTYADSVKGRFTISRDGAKNTVYLQMNSLKPEDTAVYYCKVFAASGMEYWGKGTQVTVSSAAAYPYDVPDYGSHHHHHH

SEQ ID NO: 1104 - protein, 135 aa, synthetic construct
  REGION 1..135: note = Artificial polymer
QVQLQESGGGLVQAGESLRLSCAASVSIFRSYFMGWYRQAPGKQRELVAAITDGGRLAYADSAKGRFTISREDTRNTVHLQMSSLKAEDTAVYYCTIWTTDRQQYWGQGTQVTVSSAAAYPYDVPDYGSHHHHHH

SEQ ID NO: 1105 - protein, 136 aa, synthetic construct
  REGION 1..136: note = Artificial polymer
QVQLQESGGGWVQPGGSLRLSCAATGSIVSINAIGWYRQAPGKQRELVASITNQGIRNYSTSVMGRFTISRDDVKNTVSLQMNSLKPEDSAVYYCKGFAGWGKEDYWGQGTQVTVSSAAAYPYDVPDYGSHHHHHH

SEQ ID NO: 1106 - protein, 134 aa, synthetic construct
  REGION 1..134: note = Artificial polymer
QVQLQESGGGLVQAGASLRLSCAASGSIFSINAMGWYRQAPGKQRELVAAITNQGRTTYADSVKGRFTISRDNAKNTVYLQMDSLEPEDTAIYYCKGFSPTGDYWGQGTQVTVSSAAAYPYDVPDYGSHHHHHH

SEQ ID NO: 1107 - protein, 140 aa, synthetic construct
  REGION 1..140: note = Artificial polymer
QVQLQESGGGLVQPGGSLRLSCLASRSFSSFNAMGWYRQAPGKERELVAAITNGGRIAYGIAVNGRFTISRDNAKNTVYLQMNSLKPEDTAVYYCNAKPTPVYGSTVGDYWGQGTQVTVSSAAAYPYDVPDYGSHHHHHH

SEQ ID NO: 1108 - protein, 140 aa, synthetic construct
  REGION 1..140: note = Artificial polymer
QVQLQESGGGLVQAGGSLTLSCAASGSFSSINAMGYYRQAPGKQRELVAAITNGGRIAYSDSAKGRFTISRDSAKNTMYLQMNSLKPEDTDVYYCNAKASPVYGSTVEDYWGQGTQVTVSSAAAYPYDVPDYGSHHHHHH

SEQ ID NO: 1109 - protein, 135 aa, synthetic construct
  REGION 1..135: note = Artificial polymer
QVQLQESGGGLVQPGGSLRLSCAASGTSFSINGMAWYRQAPGGQRELVGGITSDGSTGYADSVKGRFTVSRDNAKNTVYLQMNRLKPEDTAVYYCGTSTPRGDSYWGQGTQVTVSSAAAYPYDVPDYGSHHHHHH

SEQ ID NO: 1110 - protein, 145 aa, synthetic construct
  REGION 1..145: note = Artificial polymer
QVQLQESGGGLVQAGGSLRLSCAASGRTFSTYAMGWFRQAPGKERGLVAAISWSGGSTYYADSVKGRFTIFRDNAENTVYLQMNSLKPEDTAVYYCAAEAEGSGREGNFYERSWYQGQGTQVTVSSAAAYPYDVPDYGSHHHHHH

SEQ ID NO: 1111 - protein, 135 aa, synthetic construct
  REGION 1..135: note = Artificial polymer
QVQLQESGGGLVETGGSLRLSCAASGSIFSINAMGWYRQAPGKQRELVAAITDQGRLAYADSAKGRFTISRENARNTLHLQMSSLKAEDTAVYYCTIWDRDRQQYWGQGTQVTVSSAAAYPYDVPDYGSHHHHHH

SEQ ID NO: 1112 - protein, 134 aa, synthetic construct
  REGION 1..134: note = Artificial polymer
QVQLQESGGGLVQPGGSLRLSCAASGRIFDINAMGWYRQAPGKQRELVAAITNGGQTTYADSVKGRFTISRDNAGNTVYLQMNSLRPEDTAVYYCKAFTRSDDYWGQGTQVTVSSAAAYPYDVPDYGSHHHHHH

SEQ ID NO: 1113 - protein, 135 aa, synthetic construct
  REGION 1..135: note = Artificial polymer
QVQLQESGGGLVQAGGSLRLSCAASGTLFSINGMAWYRQAPGKRRELVGGITSDGSTGYADSVKGRFTISRDNAKNTAYLQMNSLKPEDTAVYYCGTSTPRGDSYWGQGTQVTVSSAAAYPYDVPDYGSHHHHHH

SEQ ID NO: 1114 - protein, 134 aa, synthetic construct
  REGION 1..134: note = Artificial polymer
QVQLQESGGGLVQAGGSLRLSCAASGSIDSINAMGWYRPALGEQRELVAAITTGGRTAYVDSVKGRFTISRDAAKNTVYLQMNSLKPEDTAVYSCKAFTRDTDYWGQGTQVTVSSAAAYPYDVPDYGSHHHHHH

SEQ ID NO: 1115 - protein, 134 aa, synthetic construct
  REGION 1..134: note = Artificial polymer
QVQLQESGGGLAQPGGSLQLSCAASGRAFSTNSMGWYRQASGKQRELVAAITSQGRITLADSVKGRFTISSDNTKNTVFLQMNSLKPEDTAVYYCNAWTTLGTFGGQGTQVTVSSAAAYPYDVPDYGSHHHHHH

SEQ ID NO: 1116 - protein, 136 aa, synthetic construct
  REGION 1..136: note = Artificial polymer
QVQLQESGGGLVQTGESLSLSCAVASGSIISINSMGWYRQAPEKQRELVAAITVDGRLAYADSAKHRFTISKESARNTVHLHMSSLKPEDTAVYYCTIWVRDGQQYWGQGTQVTVSSAAAYPYDVPDYGSHHHHHH

SEQ ID NO: 1117 - protein, 140 aa, synthetic construct
  REGION 1..140: note = Artificial polymer
QVQLQESGGGLVQPGGSLRLSCAVSRNFFSINAMGWYRQAPGKQRELVAAITNGGRIAYGTSVMGRFTISRDDAKNTVDLQMNSLRPEDTAVYYCNAKAIPVYGSTVEDYWGQGTQVTVSSAAAYPYDVPDYGSHHHHHH

SEQ ID NO: 1118 - protein, 140 aa, synthetic construct
  REGION 1..140: note = Artificial polymer
QVQLQESGGGLVQPGGSLRLSCAASGRFFRVNAMGWYRQVPGKQRELVAAITNGGQIAYADSVKGRFTISRDSAKNTVYLQMNSLKSEDTDVYYCNAKAAATHLSTVADYWGQGTQVTVSSAAAYPYDVPDYGSHHHHHH

SEQ ID NO: 1119 - protein, 136 aa, synthetic construct
  REGION 1..136: note = Artificial polymer
QVQLQESGGGLVQPGGSLRLSCAASGSIVSINSMGWYRQAPGKQRELVAAITDQGRTTYADSVKGRFTISRDDAKNKNTVYLQMNSLKAEDTAVYACKAFGRFDDYWGQGTQVTVSSAAAYPYDVPDYGSHHHHHH

SEQ ID NO: 1120 - protein, 141 aa, synthetic construct
  REGION 1..141: note = Artificial polymer
QVQLQESGGGLVQPGGSLRLSCAAYGSIFSINAMGWYRQAPGKERELVAGITTQGRITYGNSVRGRFTISGDNAKNTVYLQMKSLKPEDTAVYYCSAWGVKTGPESGSGTLEGQGTQVTVSSAAAYPYDVPDYGSHHHHHH

SEQ ID NO: 1121 - protein, 134 aa, synthetic construct
  REGION 1..134: note = Artificial polymer
QVQLQESGGGLVQAGGSLRLSCAASGSIIGINSMGYYRTAPGKQRELVAAITSGGRTTYVDSVKGRFTISRDNAKNTVYLQMNSLKPEDTAVYFCKAFTRDEDYWGQGTQVTVSSAAAYPYDVPDYGSHHHHHH

SEQ ID NO: 1122 - protein, 138 aa, synthetic construct
  REGION 1..138: note = Artificial polymer
QVQLQESGGGLVQAGGSLRLSCAASGRTFPGYVMAWFRQSPGQEREFAAAINWRGGDTYYADSVKGRFTISRDNVKNTVFLQMNSLKPEDTAVYFCAARLTTEYDYAYWGQGTQVTVSSAAAYPYDVPDYGSHHHHHH

SEQ ID NO: 1123 - protein, 134 aa, synthetic construct
  REGION 1..134: note = Artificial polymer
QVQLQESGGGLVQPGESLRLSCAASGSIFSINAMGWYRQAPGKQRELVAAITDGGAKTYADSVKGRFTISTDNAGNTVYLQMDSLRPEDTAVYYCKAFTRGNDYWGQGTQVTVSSAAAYPYDVPDYGSHHHHHH

SEQ ID NO: 1124 - protein, 134 aa, synthetic construct
  REGION 1..134: note = Artificial polymer
QVQLQESGGGLVQAGESLRLSCVVSGRTFSINAMGWYRQAPGKQRELVAAITNQGRLSYVDSVKGRFTISRDNAANTVYLQMNSLKPEDTAVYYCAAFQSSGIDWGQGTQVTVSSAAAYPYDVPDYGSHHHHHH

SEQ ID NO: 1125 - protein, 134 aa, synthetic construct
  REGION 1..134: note = Artificial polymer
QVQLQESGGGLVQAGGSLRLSCAASGRTLSSYTIGWYRQAPGKQRELVAAITNQGRRTYADSVKGRFTISRDNAKNTVYLQMDSLKSEDTAVYYCKGFSPTDDFWGQGTQVTVSSAAAYPYDVPDYGSHHHHHH

SEQ ID NO: 1126 - protein, 140 aa, synthetic construct
  REGION 1..140: note = Artificial polymer
QVQLQESGGGLVQPGGSLRLSCTASGSFFSINAMGWYRQAPGNQRELVAAITNGGRIAYTDSVKGRFTISNDNAKNTVYLQMNSLKPEDTDVYYCNAKAIPIYGSTAEDYWGQGTQVTVSSAAAYPYDVPDYGSHHHHHH

SEQ ID NO: 1127 - protein, 134 aa, synthetic construct
  REGION 1..134: note = Artificial polymer
QVQLQESGGGLVQAGGSLRLSCAASGSIFSINSMGWYRQAPGKQRELVAAITNGGRTTYADSVKGRFTISRDNAKNTVYLQMDSLKPEDTAVYYCKGFSLTDDYWGQGTQVTVSSAAAYPYDVPDYGSHHHHHH

SEQ ID NO: 1128 - protein, 135 aa, synthetic construct
  REGION 1..135: note = Artificial polymer
QVQLQESGGGLVQTGGSLRLSCAASGSIFSFNAMGWYRQAPGKQRELVAAITDGGRLTYADSAKGRFTISRENTRNTVHLQMSSLKAEDTADYYCTIWTRDRQQYWGQGTQVTVSSAAAYPYDVPDYGSHHHHHH

SEQ ID NO: 1129 - protein, 134 aa, synthetic construct
  REGION 1..134: note = Artificial polymer
QVQLQESGGGLVQAGGSLRLSCAASGSIFSINAMGWYRPALGEQRELVAAITTGGRTTYVDSVKGRFSISRDNAKNTVYLQMNSLKPEDTAVYFCKAFTRDEDFWGQGTQVTVSSAAAYPYDVPDYGSHHHHHH

SEQ ID NO: 1130 - protein, 145 aa, synthetic construct
  REGION 1..145: note = Artificial polymer
QVQLQESGGGLVQAGGSLRLSCEASGRTFSTYAMAWFRQAPGKERDLVAAISWSGGSTEYHDSVKGRFTISRDNTKNTVYLQMNSLKAEDTAVYYCAAEVEGSGREGNFYGASWYPGQGTQVTVSSAAAYPYDVPDYGSHHHHHH

SEQ ID NO: 1131 - protein, 132 aa, synthetic construct
  REGION 1..132: note = Artificial polymer
QVQLQESGGGLVQPGGSLRLSCAASGSFFSINAMGWYRQAPGKQRELVAAITNQGRIAYADSVKGRFTISRDNAKNTVYLQMNSLKPEDTAVYYCGRPGWDYWGQGTQVTVSSAAAYPYDVPDYGSHHHHHH

SEQ ID NO: 1132 - protein, 135 aa, synthetic construct
  REGION 1..135: note = Artificial polymer
QVQLQESGGGLVQAGGSLRLSCVASVNIGSLNSMVWYRQSPGKQRELVAGITGSGQITYANSVRGRFTVSRDIAKSTAYLQMNTLKPEDTAVYYCAAYDRSATAYWGQGTQVTVSSAAAYPYDVPDYGSHHHHHH

SEQ ID NO: 1133 - protein, 139 aa, synthetic construct
  REGION 1..139: note = Artificial polymer
QVQLQESGGGLVQAGGSLRVSCAASGRTLSNYAVGWWRQAPGKQREFVAAINWSSGGISYSNSAKGRFALSRDNAKNTVYLQMDSLKPEDTAVYYCAAASSVLSGTVDYWGQGTQVTVSSAAAYPYDVPDYGSHHHHHH

SEQ ID NO: 1134 - protein, 135 aa, synthetic construct
  REGION 1..135: note = Artificial polymer
QVQLQESGGGLVQPGGSLRLSCAASGSISSINAMGWYRQAPGKQRELVAAITGQGRTTYADSVKGRFTISRDGAKNTVYLQMNSLKPEDTAVYYCKVFAADGMEYWGKGTQVTVSSAAAYPYDVPDYGSHHHHHH

SEQ ID NO: 1135 - protein, 140 aa, synthetic construct
  REGION 1..140: note = Artificial polymer
QVQLQESGGGLVQPGGSLRLSCAASGRFFRVNAMGWYRQAPGKQRELVAAITNGGQIVYADSVKGRFTISRDSAKNTVYLQMNSLKSEDTAVYYCNAKAAASYVSTVADYWGQGTQVTVSSAAAYPYDVPDYGSHHHHHH

SEQ ID NO: 1136 - protein, 134 aa, synthetic construct
  REGION 1..134: note = Artificial polymer
QVQLQESGGGLVQAGGSLRLSCAASGSVFSINAMGWYRQAPEKQRELVAAITTQGRTTYEDSVKGRFTISRDGAQNTVYLQMDSLKPEDTAVYYCKAWTAKDDYWGKGTQVTVSSAAAYPYDVPDYGSHHHHHH

SEQ ID NO: 1137 - protein, 136 aa, synthetic construct
  REGION 1..136: note = Artificial polymer
QVQLQESGGGRVQPGGSLRLSCAAIGSIFEINSIGWYRQAPGKQRELVAAITSGGITNYANSVQGRSTISRDNVNNTVYLQMNSLKPEDSAVYYCKGFTGWGKEDYWGQGTQVTVSSAAAYPYDVPDYGSHHHHHH

SEQ ID NO: 1138 - protein, 135 aa, synthetic construct
  REGION 1..135: note = Artificial polymer
QVQLQESGGGLVQTGGSLRLSCAASGSIFNINSMGWYRQAPGKQRELVAAITVGGRLAYADSAKGRFTISKESARNTVHLQMSSLKPEDTAVYYCTIWAADYQQYWGQGTQVTVSSAAAYPYDVPDYGSHHHHHH

SEQ ID NO: 1139 - protein, 135 aa, synthetic construct
  REGION 1..135: note = Artificial polymer
QVQLQESGGGLVQAGGSLRLSCAASVNIGTLNSMAWYREAPGKQRELVAGITGGGQITYANSVRGRFTVSRDIAKSTAYLQMNTLKPEDTAVYYCAAYDRSATPYWGQGTQVTVSSAAAYPYDVPDYGSHHHHHH

SEQ ID NO: 1140 - protein, 135 aa, synthetic construct
  REGION 1..135: note = Artificial polymer
QVQLQESGGGLVQTGGSLRLSCAASGSIFSINSMGWYRQAPGKQRELVAAITSQGRSTYADSAKGRFTISLGNARNTVNLQMSSLKTEDTAVYYCTIWARDRQQYWGQGTQVTVSSAAAYPYDVPDYGSHHHHHH

SEQ ID NO: 1141 - protein, 134 aa, synthetic construct
  REGION 1..134: note = Artificial polymer
QVQLQESGGGLVQPGGSLRLSCAASGRIGSINSMGWYRQAPGKQREMVAAITNGGATVYADSVKGRFTISRDNAGNTVDLHMNSLRPEDSAVYYCKAFTRGDDYWGQGTQVTVSSAAAYPYDVPDYGSHHHHHH

SEQ ID NO: 1142 - protein, 135 aa, synthetic construct
  REGION 1..135: note = Artificial polymer
QVQLQESGGGLVQPGGSLKLSCAASGSIFSFNAMGWYRQAPGKQRELVAAITDGGRLTYADSAKNRFTISRENTRNTVHLQMSSLKAEDTAVYYCTIWTKDRQQYWGQGTQVTVSSAAAYPYDVPDYGSHHHHHH

SEQ ID NO: 1143 - protein, 134 aa, synthetic construct
  REGION 1..134: note = Artificial polymer
QVQLQESGGGLVQPGGSLRLSCAASGRISSINSMGWYRQAPGKQRELVAAITNGGAKTYADSVKGRFTISRDGAGNTVYLQMDNLRPEDTAVYYCKAFTRTYDYWGQGTQVTVSSAAAYPYDVPDYGSHHHHHH

SEQ ID NO: 1144 - protein, 139 aa, synthetic construct
  REGION 1..139: note = Artificial polymer
QVQLQESGGGLVQAGGSLRVSCAASGRTLSNYAVAWFRQAPGKQREFVAAINWSSGGISYSNAAKGRFALSRDNAKNTVYLQMDSLKPEDTAVYYCAAASSILSGTVDYWGQGTQVTVSSAAAYPYDVPDYGSHHHHHH

SEQ ID NO: 1145 - protein, 135 aa, synthetic construct
  REGION 1..135: note = Artificial polymer
QVQLQESGGGLVQPGGSLRLSCAASGRIGSINSMGWYRQAPGKQREMVAAITNGGATVYADSVKGRFTISRDNAGNTVDLHMNSLRPEDSAVYYCTIWAADYQQYWGQGTQVTVSSAAAYPYDVPDYGSHHHHHH

SEQ ID NO: 1146 - protein, 140 aa, synthetic construct
  REGION 1..140: note = Artificial polymer
QVQLQESGGGLVQPGGSLRLSCAASRSFFSFNAMGWYRQAPGKQRELVAAITNGGRIAYGTSVMGRFTISRDNAKNTVYLQMDSLKPEDTAVYYCNAKPAPVYGSTVGDYWGQGTQVTVSSAAAYPYDVPDYGSHHHHHH

SEQ ID NO: 1147 - protein, 135 aa, synthetic construct
  REGION 1..135: note = Artificial polymer
QVQLQESGGGLVQPGGSPRLSCAASGRFFRVNAMGWYRQAPGKQRELVAAITNGGQTAYADSVKGRFTISRDSAKNTVYLQMNSLKSEDTAVYYCKVFAADGMEYWGKGTQVTVSSAAAYPYDVPDYGSHHHHHH

SEQ ID NO: 1148 - protein, 133 aa, synthetic construct
  REGION 1..133: note = Artificial polymer
  SITE 54: note = misc_feature - Xaa can be any naturally occurring amino acid
QVQLQESGGGLVQPGESLRLSCAASGIIFSINAMGWYRQAPGKQRELVAAITNXGRTTYADSVKGRFTISRDNAKNTVTLQMNSLKPEDTAVYYCNAFGSGGGVGQGTQVTVSSAAAYPYDVPDYGSHHHHHH

SEQ ID NO: 1149 - protein, 139 aa, synthetic construct
  REGION 1..139: note = Artificial polymer
QVQLQESGGGLVQAGGSLRLSCAASGRTLSNYAVAWFRQAPGKQRELVAAIWWASGGISYANSAKGRFVLSRDNAKNTVYLQMDSLKPEDTAVYYCAAASSVLSGTADYWGQGTQVTVSSAAAYPYDVPDYGSHHHHHH

SEQ ID NO: 1150 - protein, 134 aa, synthetic construct
  REGION 1..134: note = Artificial polymer
QVQLQESGGGLVQPGGSLRLSCAASGRIFSVNAMGWYRQAPGKQRELVAAITNQGAPTYADSVKGRFTISRDNAGNTVYLQMNSLRPEDTAVYYCKAFTRGDDYWGQGTQVTVSSAAAYPYDVPDYGSHHHHHH

SEQ ID NO: 1151 - protein, 145 aa, synthetic construct
  REGION 1..145: note = Artificial polymer
QVQLQESGGGSVQAGGSLRLSCAASGRTFSSYAMAWFRQAPGMERELVAAISWSGGSTYYADSVKGRFTISRDNAENTVYLQMNSLKPEDTAVYYCAAEAEGSGREGNFYERSWYQGQGTQVTVSSAAAYPYDVPDYGSHHHHHH

SEQ ID NO: 1152 - protein, 115 aa, synthetic construct; identical to SEQ ID NO: 1060
  REGION 1..115: note = Artificial polymer

SEQ ID NO: 1153 - protein, 115 aa, synthetic construct
  REGION 1..115: note = Artificial polymer
DVQLVESGGGLVHPGGSLRLSCAASGSFSSINVMGWYRQAPGKERELVARITNLGLPNYADSVTGRFTISRDNSKNTVYLQMNSLRPEDTAVYYCYLVALKAEYWGQGTLVTVSS

SEQ ID NO: 1154 - protein, 115 aa, synthetic construct
  REGION 1..115: note = Artificial polymer
DVQLVESGGGLVQPGGSLRLSCAASGSFSSINVMGWYRQAPGKERELVARITNLGLPNYADSVTGRFTISRDNSKNTVYLQMNSLRPEDTAVYYCYLVALKAEYWGQGTLVTVSS

SEQ ID NO: 1155 - protein, 115 aa, synthetic construct
  REGION 1..115: note = Artificial polymer
DVQLVESGGGLVHPGGSLRLSCAASGSFSSINVMGWYRQAPGKERELVARITNLGLPNYADSVKGRFTISRDNSKNTVYLQMNSLRPEDTAVYYCYLVALKAEYWGQGTLVTVSS

SEQ ID NO: 1156 - protein, 115 aa, synthetic construct
  REGION 1..115: note = Artificial polymer
DVQLVESGGGLVQPGGSLRLSCAASGSFSSINVMGWYRQAPGKERELVARITNLGLPNYADSVKGRFTISRDNSKNTVYLQMNSLRPEDTAVYYCYLVALKAEYWGQGTLVTVSS

SEQ ID NO: 1157 - protein, 115 aa, synthetic construct
  REGION 1..115: note = Artificial polymer
QVQLQESGGGLVQPGGSLRLSCAASGRIFSVNAMGWYRQAPGKQRELVAAITNQGAPTYADSVKGRFTISRDNAGNTVYLQMNSLRPEDTAVYYCKAFTRGDDYWGQGTQVTVSS

SEQ ID NO: 1158 - protein, 115 aa, synthetic construct
  REGION 1..115: note = Artificial polymer
DVQLVESGGGLVQPGGSLRLSCAASGRIFSVNAMGWYRQAPGKQRELVAAITNQGAPTYADSVKGRFTISRDNAGNTVYLQMNSLRPEDTAVYYCKAFTRGDDYWGQGTLVTVSS

SEQ ID NO: 1159 - protein, 115 aa, synthetic construct
  REGION 1..115: note = Artificial polymer
DVQLVESGGGLVQPGGSLRLSCAASGRIFSVNAMGWYRQAPGKQRELVAAITNQGAPTYADSVKGRFTISRDNSGNTVYLQMNSLRPEDTAVYYCKAFTRGDDYWGQGTLVTVSS

SEQ ID NO: 1160 - protein, 115 aa, synthetic construct
  REGION 1..115: note = Artificial polymer
DVQLVESGGGLVQPGGSLRLSCAASGRIFSVNAMGWYRQAPGKQRELVAAITNQGAPTYADSVKGRFTISRDNAKNTVYLQMNSLRPEDTAVYYCKAFTRGDDYWGQGTLVTVSS

SEQ ID NO: 1161 - protein, 115 aa, synthetic construct
  REGION 1..115: note = Artificial polymer
DVQLVESGGGLVQPGGSLRLSCAASGRIFSVNAMGWYRQAPGKQRELVAAITNQGAPTYADSVKGRFTISRDNSKNTVYLQMNSLRPEDTAVYYCKAFTRGDDYWGQGTLVTVSS

SEQ ID NO: 1162 - skipped

SEQ ID NO: 1163 - protein, 6 aa, synthetic construct
  REGION 1..6: note = Artificial polymer
GGSGGS

SEQ ID NO: 1164 - protein, 9 aa, synthetic construct
  REGION 1..9: note = Artificial polymer
GGSGGSGGS

SEQ ID NO: 1165 - protein, 12 aa, synthetic construct
  REGION 1..12: note = Artificial polymer
GGSGGSGGSGGS

SEQ ID NO: 1166 - protein, 15 aa, synthetic construct
  REGION 1..15: note = Artificial polymer
GGSGGSGGSGGSGGS

SEQ ID NO: 1167 - protein, 18 aa, synthetic construct
  REGION 1..18: note = Artificial polymer
GGSGGSGGSGGSGGSGGS

SEQ ID NO: 1168 - protein, 21 aa, synthetic construct
  REGION 1..21: note = Artificial polymer
GGSGGSGGSGGSGGSGGSGGS

SEQ ID NO: 1169 - protein, 24 aa, synthetic construct
  REGION 1..24: note = Artificial polymer
GGSGGSGGSGGSGGSGGSGGSGGS

SEQ ID NO: 1170 - protein, 27 aa, synthetic construct
  REGION 1..27: note = Artificial polymer
GGSGGSGGSGGSGGSGGSGGSGGSGGS

SEQ ID NO: 1171 - protein, 30 aa, synthetic construct
  REGION 1..30: note = Artificial polymer
GGSGGSGGSGGSGGSGGSGGSGGSGGSGGS

SEQ ID NO: 1172 - protein, 33 aa, synthetic construct
  REGION 1..33: note = Artificial polymer
GGSGGSGGSGGSGGSGGSGGSGGSGGSGGSGGS

SEQ ID NO: 1173 - protein, 36 aa, synthetic construct
  REGION 1..36: note = Artificial polymer
GGSGGSGGSGGSGGSGGSGGSGGSGGSGGSGGSGGS

SEQ ID NO: 1174 - protein, 39 aa, synthetic construct
  REGION 1..39: note = Artificial polymer
GGSGGSGGSGGSGGSGGSGGSGGSGGSGGSGGSGGSGGS

SEQ ID NO: 1175 - protein, 42 aa, synthetic construct
  REGION 1..42: note = Artificial polymer
GGSGGSGGSGGSGGSGGSGGSGGSGGSGGSGGSGGSGGSGGS

SEQ ID NO: 1176 - protein, 45 aa, synthetic construct
  REGION 1..45: note = Artificial polymer
GGSGGSGGSGGSGGSGGSGGSGGSGGSGGSGGSGGSGGSGGSGGS

SEQ ID NO: 1177 - protein, 48 aa, synthetic construct
  REGION 1..48: note = Artificial polymer
GGSGGSGGSGGSGGSGGSGGSGGSGGSGGSGGSGGSGGSGGSGGSGGS

SEQ ID NO: 1178 - protein, 51 aa, synthetic construct
  REGION 1..51: note = Artificial polymer
GGSGGSGGSGGSGGSGGSGGSGGSGGSGGSGGSGGSGGSGGSGGSGGSGGS

SEQ ID NO: 1179 - protein, 54 aa, synthetic construct
  REGION 1..54: note = Artificial polymer
GGSGGSGGSGGSGGSGGSGGSGGSGGSGGSGGSGGSGGSGGSGGSGGSGGSGGS

SEQ ID NO: 1180 - protein, 57 aa, synthetic construct
  REGION 1..57: note = Artificial polymer
GGSGGSGGSGGSGGSGGSGGSGGSGGSGGSGGSGGSGGSGGSGGSGGSGGSGGSGGS

SEQ ID NO: 1181 - protein, 60 aa, synthetic construct
  REGION 1..60: note = Artificial polymer
GGSGGSGGSGGSGGSGGSGGSGGSGGSGGSGGSGGSGGSGGSGGSGGSGGSGGSGGSGGS

SEQ ID NO: 1182 - protein, 45 aa, synthetic construct
  REGION 1..45: note = Artificial polymer
GGGGSGGGGSGGGGSGGGGSGGGGSGGGGSGGGGSGGGGSGGGGS

SEQ ID NO: 1183 - protein, 50 aa, synthetic construct
  REGION 1..50: note = Artificial polymer
GGGGSGGGGSGGGGSGGGGSGGGGSGGGGSGGGGSGGGGSGGGGSGGGGS

SEQ ID NO: 1184 - protein, 55 aa, synthetic construct
  REGION 1..55: note = Artificial polymer
GGGGSGGGGSGGGGSGGGGSGGGGSGGGGSGGGGSGGGGSGGGGSGGGGSGGGGS

SEQ ID NO: 1185 - protein, 60 aa, synthetic construct
  REGION 1..60: note = Artificial polymer
GGGGSGGGGSGGGGSGGGGSGGGGSGGGGSGGGGSGGGGSGGGGSGGGGSGGGGSGGGGS

SEQ ID NO: 1186 - protein, 65 aa, synthetic construct
  REGION 1..65: note = Artificial polymer
GGGGSGGGGSGGGGSGGGGSGGGGSGGGGSGGGGSGGGGSGGGGSGGGGSGGGGSGGGGSGGGGS

SEQ ID NO: 1187 - protein, 70 aa, synthetic construct
  REGION 1..70: note = Artificial polymer
GGGGSGGGGSGGGGSGGGGSGGGGSGGGGSGGGGSGGGGSGGGGSGGGGSGGGGSGGGGSGGGGSGGGGS

SEQ ID NO: 1188 - protein, 75 aa, synthetic construct
  REGION 1..75: note = Artificial polymer
GGGGSGGGGSGGGGSGGGGSGGGGSGGGGSGGGGSGGGGSGGGGSGGGGSGGGGSGGGGSGGGGSGGGGSGGGGS

SEQ ID NO: 1189 - protein, 80 aa, synthetic construct
  REGION 1..80: note = Artificial polymer
GGGGSGGGGSGGGGSGGGGSGGGGSGGGGSGGGGSGGGGSGGGGSGGGGSGGGGSGGGGSGGGGSGGGGSGGGGSGGGGS

SEQ ID NO: 1190 - protein, 85 aa, synthetic construct
  REGION 1..85: note = Artificial polymer
GGGGSGGGGSGGGGSGGGGSGGGGSGGGGSGGGGSGGGGSGGGGSGGGGSGGGGSGGGGSGGGGSGGGGSGGGGSGGGGSGGGGS

SEQ ID NO: 1191 - protein, 90 aa, synthetic construct
  REGION 1..90: note = Artificial polymer
GGGGSGGGGSGGGGSGGGGSGGGGSGGGGSGGGGSGGGGSGGGGSGGGGSGGGGSGGGGSGGGGSGGGGSGGGGSGGGGSGGGGSGGGGS

SEQ ID NO: 1192 - protein, 95 aa, synthetic construct
  REGION 1..95: note = Artificial polymer
GGGGSGGGGSGGGGSGGGGSGGGGSGGGGSGGGGSGGGGSGGGGSGGGGSGGGGSGGGGSGGGGSGGGGSGGGGSGGGGSGGGGSGGGGSGGGGS

SEQ ID NO: 1193 - protein, 100 aa, synthetic construct
  REGION 1..100: note = Artificial polymer
GGGGSGGGGSGGGGSGGGGSGGGGSGGGGSGGGGSGGGGSGGGGSGGGGSGGGGSGGGGSGGGGSGGGGSGGGGSGGGGSGGGGSGGGGSGGGGSGGGGS

SEQ ID NO: 1194 - DNA, 20 bp, synthetic construct
  misc_feature 1..20: note = Artificial polymer
  source 1..20: mol_type = other DNA
ttatgcttccggctcgtatg

SEQ ID NO: 1195 - DNA, 29 bp, synthetic construct
  misc_feature 1..29: note = Artificial polymer
  source 1..29: mol_type = other DNA
gatgtgcagctgcaggagtctggrggagg

SEQ ID NO: 1196 - DNA, 34 bp, synthetic construct
  misc_feature 1..34: note = Artificial polymer
  source 1..34: mol_type = other DNA
ctagtgcggccgctgaggagacggtgacctgggt

SEQ ID NO: 1197 - DNA, 22 bp, synthetic construct
  misc_feature 1..22: note = Artificial polymer
  source 1..22: mol_type = other DNA
tcacacaggaaacagctatgac

SEQ ID NO: 1198 - DNA, 24 bp, synthetic construct
  misc_feature 1..24: note = Artificial polymer
  source 1..24: mol_type = other DNA
cgccagggttttcccagtcacgac

SEQ ID NO: 1199 - DNA, 432 bp, synthetic construct
  misc_feature 1..432: note = Artificial polymer
  source 1..432: mol_type = other DNA
caggtgcagctgcaggagtctggaggaggtgtggtgcaggctggggactctctgagactctcctgtgtagcctctggacgcaccttcagcagtcttgacatgggttggttccgccaggctccaggaaaggagcgtgagtttgtagcaggtattagccggagtggtattagccaatactatgcagactccatgaagggccgattcaccatctccagagacaacgccaagaacctggtgtatctgcaaatgaacagcctgaaacctgaggacacggccgtttattactgtgcagcagccctgacctttaggggctctgacctcccacgtgatagtaactactggggccaggggacccaggtcaccgtctcctcagcggccgcatacccgtacgacgttccggactacggttcccaccaccatcaccatcactag

SEQ ID NO: 1200 - DNA, 432 bp, synthetic construct
  misc_feature 1..432: note = Artificial polymer
  source 1..432: mol_type = other DNA
caggtgcagctgcaggagtctgggggaggtgtggtgcaggctggggactctctgaaactctcctgtgtagcctctggacgcaccttcagcagtcttgacatgggctggttccgccaggctccaggaaaggagcgtgagtttgtagcaggtattagccggagtggtattagccaatactatgcagactccatgaagggccgattcaccatctccagagacaacgccaagaacctggtgtatctgcaaatgaacagcctgaaacctgaggacacggccgtttattactgtgcagcagccctgacctttaggggctccgacctcccacgtgatagtaactactggggccaggggacccaggtcaccgtctcctcagcggccgcatacccgtacgacgttccggactacggttcccaccaccatcaccatcactag

SEQ ID NO: 1201 - DNA, 432 bp, synthetic construct
  misc_feature 1..432: note = Artificial polymer
  source 1..432: mol_type = other DNA
caggtgcagctgcaggagtctgggggaggtgtggtgcaggctggggactctctgagactctcctgtgtagcctctggacgcaccttcagcagtcttgacatgggctggttccgccagactccaggaaaggagcgtgagtttgtagcaggtattagccggagtggtattagccaatactatgcagactccatgaagggccgattcaccatctccagagacaacgccaagaacctggtgtatctgcaaatgaacagcctgaaacctgaggacacggccgtttattactgtgcagcagccctgacctttaggggctccgacctcccacgtgatagtaactactggggccaggggacccaggtcaccgtctcctcagcggccgcatacccgtacgacgttccggactacggttcccaccaccatcaccatcactag

SEQ ID NO: 1202 - DNA, 432 bp, synthetic construct
  misc_feature 1..432: note = Artificial polymer
  source 1..432: mol_type = other DNA
caggtgcagctgcaggagtctggaggaggattggtgcagcctggggactctctgagactctcctgtgtagcctctggacgcaccttcagcagtcttgacatgggctggttccgccaggctccaggaaaggagcgttagtttgtagcaggtattagccggagtggtattagccaatactatgcagactccatgaagggccgattcaccatctccagagacaacgccaagaacctggtgtatctgcaaatgaacagcctgaaacctgaggacacggccgtttattactgtgcagcagccctgacctttaggggctccgacctcccacgtgatagtaactactggggccaggggacccaggtcaccgtctcctcagcggccgcatacccgtacgacgttccggactacggttcccaccaccatcaccatcactag

SEQ ID NO: 1203 - DNA, 432 bp, synthetic construct
  misc_feature 1..432: note = Artificial polymer
  source 1..432: mol_type = other DNA
caggtgcagctgcaggagtctgggggaggtgtggtgcaggctggggactctctgagactctcctgtgtagcctctggacgcaccttcagcagtcttgacatgggctggttccgccaggctccaggaaaggagcgtgagtttgtagcaggtattagccggagtggtattagccaatactatgcagactccatgaggggccgattcaccatctccagagacaacgccaagaacctggtgtatctgcaaatgaacagcctgaaacctgaggacacggccgtttattactgtgcagcagccctgacctttaggggctccgacctcccacgtgatagtaactactggggccaggggacccaggtcaccgtctcctcagcggccgcatacccgtacgacgttccggactacggttcccaccaccatcaccatcactag

SEQ ID NO: 1204 - DNA, 432 bp, synthetic construct
  misc_feature 1..432: note = Artificial polymer
  source 1..432: mol_type = other DNA
caggtgcagctgcaggagtctgggggaggtgtggtgcaggctggggactctctgagactctcctgtgtagcctctggacgcaccttcagcagtcttgacatgggctggttccgccaggctccaggaaaggagcgtgagtttgtagcaggtattagccggacaggtattagcgcatattatgcagactccatgaagggccgattcaccatctccagagacaacgccaagaacctggtgtatctgcaaatgaacagtttgaaatctgaggacacggccgtttattactgtgcagcagccctgacctttaggggctccgacctcccacgtgatagtaactactggggccaggggacccaggtcaccgtctcctcagcggccgcatacccgtacgacgttccggactacggttcccaccaccatcaccatcactag

SEQ ID NO: 1205 - DNA, 432 bp, synthetic construct
  misc_feature 1..432: note = Artificial polymer
  source 1..432: mol_type = other DNA
caggtgcagctgcaggagtctggaggaggcttggtgcagcctgggggttctctgagactctcctgtgcagcctctggattcaccttcggaggctatgacatgggctggttccgccaggctccaggaaaggagcgtgagtttgtagcaggtattagccggagtggtattagccaatactatgcagactccatgaagggccgattcaccatctccagagacaacgccaagaacctggtgtatctgcaaatgaacagcctgaaacctgaggacacggccgtttattactgtgcagcagccctgacctttaggggctccgacctcccacgtgatagtaactactggggccaggggacccaggtcaccgtctcctcagcggccgcatacccgtacgacgttccggactacggttcccaccaccatcaccatcactag

SEQ ID NO: 1206 - DNA, 432 bp, synthetic construct
  misc_feature 1..432: note = Artificial polymer
  source 1..432: mol_type = other DNA
caggtgcagctgcaggagtctgggggaggtgtggtgcaggctggggactctctgagactctcctgtgtagcctctggacgcaccttcagcagtcttgacatgggctggttccgccaggctccaggaaaggagcgtgagtttgtagcaggtattagccggagtggtattagccaatactatgcagactccatgaagggccgattcaccatctccagagacaacgccaagagcctggtgtatctgcaaatgaacagcctgaaacctgaggacacggccgtttattactgtgcagcagccctgacctttaggggctccgacctcccacgtgatagtaactactggggccaggggacccaggtcaccgtctcctcagcggccgcatacccgtacgacgttccggactacggttcccaccaccatcaccatcactag

SEQ ID NO: 1207 - DNA, 432 bp, synthetic construct
  misc_feature 1..432: note = Artificial polymer
  source 1..432: mol_type = other DNA
caggtgcagctgcaggagtctggaggaggcttggtgcaggctggggggtctctgagactctcctgtacagcctctggacgcaccttcagcagtcttgacatgggctggttccgccaggctccaggaaaggagcgtgagtttgtagcaggtattagccggagtggtattagccaatactatgcagactccatgaagggccgattcaccatctccagagacaacgccaagaacctggtgtatctgcaaatgaacagcctgaaacctgaggacacggccgtttattactgtgcagcagccctgacctttaggggctccgacctcccacgtgatagtaactactggggccaggggacccaggtcaccgtctcctcagcggccgcatacccgtacgacgttccggactacggttcccaccaccatcaccatcactag

SEQ ID NO: 1208 - DNA, 432 bp, synthetic construct
  misc_feature 1..432: note = Artificial polymer
  source 1..432: mol_type = other DNA
caggtgcagctgcaggagtctgggggaggtgtggtgcagactggggactctctgagactctcctgtgtagcctctggacgcaccttcagcagtcttgacatgggctggttccgccaggctccaggaaaggagcgtgagtttgtagcaggtattagccggagtggtattagccaatactatgcagactccatgaagggccgattcaccatctccagagacaacgccaagaacctggtgtatctgcaaatgaacagcctgaaacctgaggacacggccgtttattactgtgcagcagccctgacctttaggggctccgacctcccacgtgatagtaactactggggccaggggacccaggtcaccgtctcctcagcggccgcatacccgtacgacgttccggactacggttcccaccaccatcaccatcactag

SEQ ID NO: 1209 - DNA, 432 bp, synthetic construct
  misc_feature 1..432: note = Artificial polymer
  source 1..432: mol_type = other DNA
caggtgcagctgcaggagtctgggggaggtgtggtgcaggctggggactctctgagactctcctgtgtagcctctggacgcaccttcagcagccttgacatgggctggttccgccaggctccaggaaaggagcgtgagtttgtagcaggtattagccggagtggtattagccaatactatgcaaactccatgaagggccgattcaccatctccagagacaacgccaagaacctggtgtatctgcaaatgaacagcctgaaacctgaggacacggccgtttattactgtgcagcagccctgacctttaggggctccgacctcccacgtgatagtaactactggggccaggggacccaggtcaccgtctcctcagcggccgcatacccgtacgacgttccggactacggttcccaccaccatcaccatcactag

SEQ ID NO: 1210 - DNA, 432 bp, synthetic construct
  misc_feature 1..432: note = Artificial polymer
  source 1..432: mol_type = other DNA
caggtgcagctgcaggagtctggaggaggtgtggtgcaggctggggaccctctgagactctcctgtgtagcctctggacgcaccttcagcagtcttgacatgggctggttccgccaggctccaggaaaggagcgtgagtttgtagcaggtattagccggagtggtattagccaatactatgcagactccatgaagggccgattcaccatctccagagacaacgccaagaacctggtgtatctgcaaatgaacagcctgaaacctgaggacacggccgtttattactgtgcagcagccctgacctttaggggctccgacctcccacgtgatagtaactactggggccaggggacccaggtcaccgtctcctcagcggccgcatacccgtacgacgttccggactacggttcccaccaccatcaccatcactag

SEQ ID NO: 1211 - DNA, 432 bp, synthetic construct
  misc_feature 1..432: note = Artificial polymer
  source 1..432: mol_type = other DNA
caggtgcagctgcaggagtctgggggaggattggtgcaggctgggggctctctgagactctcctgtgcagcctctggacgcaccttcagcagtcttgacatgggctggttccgccaggctccaggaaaggagcgtgagtttgtagcaggtattagccggagtggtattagccaatactatgcagactccatgaagggccgattcaccatctccagagacaacgccaagaacctggtgtatctgcaaatgaacagcctgaaacctgaggacacggccgtttattactgtgcagcagccctgacctttaggggctccgacctcccacgtgatagtaactactggggccaggggacccaggtcaccgtctcctcagcggccgcatacccgtacgacgttccggactacggttcccaccaccatcaccatcactag

SEQ ID NO: 1212 - DNA, 432 bp, synthetic construct
  misc_feature 1..432: note = Artificial polymer
  source 1..432: mol_type = other DNA
caggtgcagctgcaggagtctgggggaggatgggtgcaacctgggggctctctgagactctcctgtgaagcctctggacgcacctccagcagtcttgacatgggctggttccgccaggctccaggaaaggagcgtgagtttgtagcaggtattagccggacaggtattagcgcatattatgcagactccatgaagggccgattcaccatctccagagacaacgccaagaacctggtgtatctgcaaatgaacagtttgaaatctgaggacacggccgtttattactgtgcagcagccctgacctttaggggctccgacctcccacgtgatagtaactactggggccaggggacccaggtcaccgtctcctcagcggccgcatacccgtacgacgttccggactacggttcccaccaccatcaccatcactag

SEQ ID NO: 1213 - DNA, 432 bp, synthetic construct
  misc_feature 1..432: note = Artificial polymer
  source 1..432: mol_type = other DNA
caggtgcagctgcaggagtctgggggaggatcggtgcaggctgggggctctctgagactctcctgtgtagcctctggacgcaccttcagcagtcttgacatgggctggttccgccaggctccaggaaaggagcgtgagtttgtagcaggtattagccggagtggtattagccaatactatgcagactccatgaagggccgattcaccatctccagagacaacgccaagaacctggtgtatctgcaaatgaacagcctgaaacctgaggacacggccgtttattactgtgcagcagccctgacctttaggggctccgacctcccacgtgatagtaactactggggccaggggacccaggtcaccgtctcctcagcggccgcatacccgtacgacgttccggactacggttcccaccaccatcaccatcactag

SEQ ID NO: 1214 - DNA, 432 bp, synthetic construct
  misc_feature 1..432: note = Artificial polymer
  source 1..432: mol_type = other DNA
caggtgcagctgcaggagtctggaggaggtgtggtgcaggctggggactctctgagactctcctgtgtagcctctggacgcaccttcagcagtcttgacatgggctggttccgccaggctccaggaaaggagcgtgagtttgtagcaggtgttagccggagtggtattagccaatactatgcagactccatgaagggccgattcaccatctccagagacaacgccaagaacctggtgtatctgcaaatgaacagcctgaaacctgaggacacggccgtttattactgtgcagcagccctgacctttaggggctccgacctcccacgtgatagtaactactggggccaggggacccaggtcaccgtctcctcagcggccgcatacccgtacgacgttccggactacggttcccaccaccatcaccatcactag

SEQ ID NO: 1215 - DNA, 432 bp, synthetic construct
  misc_feature 1..432: note = Artificial polymer
  source 1..432: mol_type = other DNA
caggtgcagctgcaggagtctgggggaggcttggtgcagcctggggggtctctgagactctcctgtgcagcctctggacgcaccttcagcagtcttgacatgggctggttccgccaggctccaggaaaggagcgtgagtttgtagcaggtattagccggagtggtattagccaatactatgcagactccatgaagggccgattcaccatctccagagacaacgccaagaacctggtgtatctgcaaataaacagcctgaaacctgaggacacggccgtttattactgtgcagcagccctgacctttaggggctccgacctcccacgtgatagtaactactggggccaggggacccaggtcaccgtctcctcagcggccgcatacccgtacgacgttccggactacggttcccaccaccatcaccatcactag

SEQ ID NO: 1216 - DNA, 432 bp, synthetic construct
  misc_feature 1..432: note = Artificial polymer
  source 1..432: mol_type = other DNA
caggtgcagctgcaggagtctgggggaggtgtggtgcaggctggggactctctgagactctcctgtgtagcctctggacacaccttcagcagtcttgacatgggctggttccgccaggctccaggaaaggagcgtgagtttgtagcaggtattagccggagtggtattagccaatactatgcagactccatgaagggccgattcaccatctccagagacaacgccaagaacctggtgtatctgcaaatgaacagcctgaaacctgaggacacggccgtttattactgtgcagcagccctgacctttaggggctccgacctcccacgtgatagtaactactggggccaggggacccaggtcaccgtctcctcagcggccgcatacccgtacgacgttccggactacggttcccaccaccatcaccatcactag

SEQ ID NO: 1217 - DNA, 432 bp, synthetic construct
  misc_feature 1..432: note = Artificial polymer
  source 1..432: mol_type = other DNA
caggtgcagctgcaggagtctgggggaggtgtggtgcaggctggggactctctgagactctcctgtgtagcctctgaacgcaccttcagcagtcttgacatgggctggttccgccaggctccaggaaaggagcgtgagtttgtagcaggtattagccggagtggtattagccaatactatgcagactccatgaagggccgattcaccatctccagagacaacgccaagaacctggtgtatctgcaaatgaacagcctgaaacctgaggacacggccgtttattactgtgcagcagccctgacctttaggggctccaacctcccacgtgatagtaactactggggccaggggacccaggtcaccgtctcctcagcggccgcatacccgtacgacgttccggactacggttcccaccaccatcaccatcactag

SEQ ID NO: 1218 - DNA, 432 bp, synthetic construct
  misc_feature 1..432: note = Artificial polymer
  source 1..432: mol_type = other DNA
caggtgcagctgcaggagtctgggggaggtgtggtgcaggctggggactctctgagactctcctgtgtagcctctgaacgcaccttcagcagtcttgacatgggctggttccgccaggctccaggaaaggagcgtgagtttgtagcaggtattagccggagtggtattagccaatactatgcagactccatgaagggccgattcaccatctccagagacaacgccaagaacctggtgtatctgcaaatgaacagcctgaaacctgaggacacggccgtttattactgtgcagcagccctgacctttaggggctccgacctcccacgtgatagtaactactggggccaggggacccaggtcaccgtctcctcagcggccgcatacccgtacgacgttccggactacggttcccaccaccatcaccatcactag

SEQ ID NO: 1219 - DNA, 432 bp, synthetic construct
  misc_feature 1..432: note = Artificial polymer
  source 1..432: mol_type = other DNA
caggtgcagctgcaggagtctggaggaggcgtggtgcaggctggggactctctgggactctcctgtgtagcctctggacgcaccttcagcagtcttgacatgggctggttccgccaggctccaggaaaggagcgtgagtttgtagcaggtattagccggagtggtattagccaatactatgcagactccatgaagggccgattcaccatctccagagacaacgccaagaacctggtgtatctgcaaatgaacagcctgaaacctgaggacacggccgtttattactgtgcagcagccctgacctttaggggctccgacctcccacgtgatagtaactactggggccaggggacccaggtcaccgtctcctcagcggccgcatacccgtacgacgttccggactacggttcccaccaccatcaccatcactag

SEQ ID NO: 1220 - DNA, 432 bp, synthetic construct
  misc_feature 1..432: note = Artificial polymer
  source 1..432: mol_type = other DNA
caggtgcagctgcaggagtctgggggaggtgtggtgcaggctggggactctctgagactctcctgtgtagcctctggacgcgccttcagcagtcttgacatgggctggttccgccaggctccaggaaaggagcgtgagtttgtagcaggtattagccggagtggtattagccaatactatgcagactccatgaagggccgattcaccatctccagagacaacgccaagaacctggtgtatctgcaaatgaacagcctgaaacctgaggacacggccgtttattactgtgcagcagccctgacctttaggggctccgacctcccacgtgatagtaactactggggccaggggacccaggtcaccgtctcctcagcggccgcatacccgtacgacgttccggactacggttcccaccaccatcaccatcactag

SEQ ID NO: 1221 - DNA, 432 bp, synthetic construct
  misc_feature 1..432: note = Artificial polymer
  source 1..432: mol_type = other DNA
caggtgcagctgcaggagtctgggggaggtgtggtgcaggctggggactctctgagactctcctgtgtagcctctggacgcaccttcagcagtcttgacatgggctggttccgccaggctccaggaaaggagcgtgagtttgtagcaggtattagccggagtggtattagccaatactatgcagactccatgaagggccgattcaccatctccagagacaacgccaagaacctggtgtatctgcaaatgaacagcctgagacctgaggacacggccgtttattactgtgcagcagccctgacctttaggggctccgacctcccacgtgatagtaactactggggccaggggacccaggtcaccgtctcctcagcggccgcatacccgtacgacgttccggactacggttcccaccaccatcaccatcactag

SEQ ID NO: 1222 - DNA, 432 bp, synthetic construct
  misc_feature 1..432: note = Artificial polymer
  source 1..432: mol_type = other DNA
caggtgcagctgcaggagtctgggggaggatcggtgcaggctggggactctctgagactctcctgtgtagcctctggacgcaccttcagcagtcttgacatgggctggttccgccaggctccaggaaaggagcgtgagtttgtagcaggtattagccggacaggtattagcgcatattatgcagactccatgaagggccgattcaccatctccagagacaacgccaagaacctggtgtatctgcaaatgaacagtttgaaatctgaggacacggccgtttattactgtgcagcagccctgacctttaggggctccgacctcccacgtgatagtaactactggggccaggggacccaggtcaccgtctcctcagcggccgcatacccgtacgacgttccggactacggttcccaccaccatcaccatcactag

SEQ ID NO: 1223 - DNA, 432 bp, synthetic construct
  misc_feature 1..432: note = Artificial polymer
  source 1..432: mol_type = other DNA
caggtgcagctgcaggagtctgggggaggattggtgcagagtggggactctctgagactctcctgtgtagcctctggacgcaccttcagcagtcttgacatgggctggttccgccaggctccaggaaaggagcgtgagtttgtagcaggtattagccggagtggtattagccaatactatgcagactccatgaagggccgattcaccatctccagagacaacgccaagaacctggtgtatctgcaaatgaacagcctgaaacctgaggacacggccgtttattactgtgcagcagccctgacctttaggggctccgacctcccacgtgatagtaactactggggccaggggacccaggtcaccgtctcctcagcggccgcatacccgtacgacgttccggactacggttcccaccaccatcaccatcactag

SEQ ID NO: 1224 - DNA, 432 bp, synthetic construct
  misc_feature 1..432: note = Artificial polymer
  source 1..432: mol_type = other DNA
caggtgcagctgcaggagtctgggggaggattggtgcaggctggggactctctgagactctcctgtgtagcctctggacgcaccttcagcagtcttgacatgggctggttccgccaggctccaggaaaggagcgtgagtttgtagcaggtattagccggagtggtattagccaatactatgcagactccatgaagggccgattcaccatctccagagacaacgccaagaacctggtgtatctgcaaatgaacagcctgaaacctgaggacacggccgtttattactgtgcagcagccctgacctttaggggctccgacctcccacgtgatagtaactactggggccaggggacccaggtcaccgtctcctcagcggccgcatacccgtacgacgttccggactacggttcccaccaccatcaccatcactag

SEQ ID NO: 1225 - DNA, 441 bp, synthetic construct
  misc_feature 1..441: note = Artificial polymer
  source 1..441: mol_type = other DNA
caggtgcagctgcaggagtctgggggaggattggtgcagcctggaggctctctgagactctcctgtgcagcctctgggcttaacttcaggcgctataccatgggctggttccgccaggctccaggaaaggagcgtgagtttgtaggagtcattaactggagtgatgatagcatttactatgcagactccgtgaagggccgattcgccatctccagagacaacaccaagaacacggtgtatctgcaaatggccagcctgaaacctgaggacacggccgtttattactgtgcagcaagcccacagtgggatactcgagtgcgacaaacgatgcgcgggaagtatgactattggggccaggggacccaggtcaccgtctcctcagcggccgcatacccgtacgacgttccggactacggttcccaccaccatcaccatcactag

SEQ ID NO: 1226 - protein, 169 aa, synthetic construct
  REGION 1..169: note = Synthetic polypeptide
NFMYSKTVKRLSKLREYQQYHPSLTCVMEGKDIEDWSCCPTPWTSFQSSCYFISTGMQSWTKSQKNCSVMGADLVVINTREEQDFIIQNLKRNSSYFLGLSDPGGRRHWQWVDQTPYNENVTFWHSGEPNNLDERCAIINFRSSEEWGWNDIHCHVPQKSICKMKKIYI

SEQ ID NO: 1227 - protein, 10 aa, synthetic construct
  REGION 1..10: note = Synthetic polypeptide
GSTFRHHAMA

SEQ ID NO: 1228 - protein, 10 aa, synthetic construct
  REGION 1..10: note = Synthetic polypeptide
GSTFRHHALA

SEQ ID NO: 1229 - protein, 10 aa, synthetic construct
  REGION 1..10: note = Synthetic polypeptide
GSTFKHHAMA

SEQ ID NO: 1230 - protein, 10 aa, synthetic construct
  REGION 1..10: note = Synthetic polypeptide
GNNFEHYAVA

SEQ ID NO: 1231 - protein, 10 aa, synthetic construct
  REGION 1..10: note = Synthetic polypeptide
GDTFSMYAMG

SEQ ID NO: 1232 - protein, 10 aa, synthetic construct
  REGION 1..10: note = Synthetic polypeptide
GDTFSMYTMG

SEQ ID NO: 1233 - protein, 10 aa, synthetic construct
  REGION 1..10: note = Synthetic polypeptide
GNTFSMYAMG

SEQ ID NO: 1234 - protein, 10 aa, synthetic construct
  REGION 1..10: note = Synthetic polypeptide
TDTFSSLAMA

SEQ ID NO: 1235 - protein, 10 aa, synthetic construct
  REGION 1..10: note = Synthetic polypeptide
GRTFSNYAMG

SEQ ID NO: 1236 - protein, 10 aa, synthetic construct
  REGION 1..10: note = Synthetic polypeptide
GRTFSDYAMG

SEQ ID NO: 1237 - protein, 10 aa, synthetic construct
  REGION 1..10: note = Synthetic polypeptide
GRTFSGYAMG

SEQ ID NO: 1238 - protein, 10 aa, synthetic construct
  REGION 1..10: note = Synthetic polypeptide
GRTFTGYAMG

SEQ ID NO: 1239 - protein, 10 aa, synthetic construct
  REGION 1..10: note = Synthetic polypeptide
GLTFGRYAMG

SEQ ID NO: 1240 - protein, 10 aa, synthetic construct
  REGION 1..10: note = Synthetic polypeptide
GFTFDGYAIG

SEQ ID NO: 1241 - protein, 10 aa, synthetic construct
  REGION 1..10: note = Synthetic polypeptide
GFTFSDYAVG

SEQ ID NO: 1242 - protein, 10 aa, synthetic construct
  REGION 1..10: note = Synthetic polypeptide
GSTFSDYAVG

SEQ ID NO: 1243 - protein, 10 aa, synthetic construct
  REGION 1..10: note = Synthetic polypeptide
GRTFINYAMG

SEQ ID NO: 1244 - protein, 10 aa, synthetic construct
  REGION 1..10: note = Synthetic polypeptide
GRTFSNYAMG

SEQ ID NO: 1245 - protein, 10 aa, synthetic construct
  REGION 1..10: note = Synthetic polypeptide
GDTFSNYAMG

SEQ ID NO: 1246 - protein, 10 aa, synthetic construct
  REGION 1..10: note = Synthetic polypeptide
ERTFSNYAMG

SEQ ID NO: 1247 - protein, 10 aa, synthetic construct
  REGION 1..10: note = Synthetic polypeptide
VFTLNNFIMS

SEQ ID NO: 1248 - protein, 10 aa, synthetic construct
  REGION 1..10: note = Synthetic polypeptide
GRTFSTYAMG

SEQ ID NO: 1249 - protein, 10 aa, synthetic construct
  REGION 1..10: note = Synthetic polypeptide
GRNLAYYVMG

SEQ ID NO: 1250 - protein, 10 aa, synthetic construct
  REGION 1..10: note = Synthetic polypeptide
GFDFSDYVMY

SEQ ID NO: 1251 - protein, 10 aa, synthetic construct
  REGION 1..10: note = Synthetic polypeptide
GRSISNYNMG

SEQ ID NO: 1252 - protein, 10 aa, synthetic construct
  REGION 1..10: note = Synthetic polypeptide
GRIFSINAMG

SEQ ID NO: 1253 - protein, 10 aa, synthetic construct
  REGION 1..10: note = Synthetic polypeptide
GRTFSSYAMG

SEQ ID NO: 1254 - protein, 10 aa, synthetic construct
  REGION 1..10: note = Synthetic polypeptide
GRTFSSLAMG

SEQ ID NO: 1255 - protein, 10 aa, synthetic construct
  REGION 1..10: note = Synthetic polypeptide
ERTFTNYAMG

SEQ ID NO: 1256 - protein, 10 aa, synthetic construct
  REGION 1..10: note = Synthetic polypeptide
GRTFTNYAMG

SEQ ID NO: 1257 - protein, 10 aa, synthetic construct
  REGION 1..10: note = Synthetic polypeptide
ERTFTNYAMA

SEQ ID NO: 1258 - protein, 10 aa, synthetic construct
  REGION 1..10: note = Synthetic polypeptide
GRIFSNSAMG

SEQ ID NO: 1259 - protein, 10 aa, synthetic construct
  REGION 1..10: note = Synthetic polypeptide
GREISSPAMG

SEQ ID NO: 1260 - protein, 10 aa, synthetic construct
  REGION 1..10: note = Synthetic polypeptide
GRDFANDAVA

SEQ ID NO: 1261 - protein, 10 aa, synthetic construct
  REGION 1..10: note = Synthetic polypeptide
GRTFSNYAMG

SEQ ID NO: 1262 - protein, 10 aa, synthetic construct
  REGION 1..10: note = Synthetic polypeptide
GDTFSMYAMG

SEQ ID NO: 1263 - protein, 10 aa, synthetic construct
  REGION 1..10: note = Synthetic polypeptide
GRDFANDAVA

SEQ ID NO: 1264 - protein, 5 aa, synthetic construct
  REGION 1..5: note = Synthetic polypeptide
HHAMA

SEQ ID NO: 1265 - protein, 5 aa, synthetic construct
  REGION 1..5: note = Synthetic polypeptide
HHALA

SEQ ID NO: 1266 - protein, 5 aa, synthetic construct
  REGION 1..5: note = Synthetic polypeptide
HYAVA

SEQ ID NO: 1267 - protein, 5 aa, synthetic construct
  REGION 1..5: note = Synthetic polypeptide
MYAMG

SEQ ID NO: 1268 - protein, 5 aa, synthetic construct
  REGION 1..5: note = Synthetic polypeptide
MYTMG

SEQ ID NO: 1269 - protein, 5 aa, synthetic construct
  REGION 1..5: note = Synthetic polypeptide
SLAMA

SEQ ID NO: 1270 - protein, 5 aa, synthetic construct
  REGION 1..5: note = Synthetic polypeptide
NYAMG

SEQ ID NO: 1271 - protein, 5 aa, synthetic construct
  REGION 1..5: note = Synthetic polypeptide
DYAMG

SEQ ID NO: 1272 - protein, 5 aa, synthetic construct
  REGION 1..5: note = Synthetic polypeptide
GYAMG

SEQ ID NO: 1273 - protein, 5 aa, synthetic construct
  REGION 1..5: note = Synthetic polypeptide
RYAMG

SEQ ID NO: 1274 - protein, 5 aa, synthetic construct
  REGION 1..5: note = Synthetic polypeptide
GYAIG

SEQ ID NO: 1275 - protein, 5 aa, synthetic construct
  REGION 1..5: note = Synthetic polypeptide
DYAVG

SEQ ID NO: 1276 - protein, 5 aa, synthetic construct
  REGION 1..5: note = Synthetic polypeptide
NFIMS

SEQ ID NO: 1277 - protein, 5 aa, synthetic construct
  REGION 1..5: note = Synthetic polypeptide
TYAMG

SEQ ID NO: 1278 - protein, 5 aa, synthetic construct
  REGION 1..5: note = Synthetic polypeptide
YYVMG

SEQ ID NO: 1279 - protein, 5 aa, synthetic construct
  REGION 1..5: note = Synthetic polypeptide
DYVMY

SEQ ID NO: 1280 - protein, 5 aa, synthetic construct
  REGION 1..5: note = Synthetic polypeptide
NYNMG

SEQ ID NO: 1281 - protein, 5 aa, synthetic construct
  REGION 1..5: note = Synthetic polypeptide
INAMG

SEQ ID NO: 1282 - protein, 5 aa, synthetic construct
  REGION 1..5: note = Synthetic polypeptide
SYAMG

SEQ ID NO: 1283 - protein, 5 aa, synthetic construct
  REGION 1..5: note = Synthetic polypeptide
SLAMG

SEQ ID NO: 1284 - protein, 5 aa, synthetic construct
  REGION 1..5: note = Synthetic polypeptide
NYAMA

SEQ ID NO: 1285 - protein, 5 aa, synthetic construct
  REGION 1..5: note = Synthetic polypeptide
NSAMG

SEQ ID NO: 1286 - protein, 5 aa, synthetic construct
  REGION 1..5: note = Synthetic polypeptide
SPAMG

SEQ ID NO: 1287 - protein, 5 aa, synthetic construct
  REGION 1..5: note = Synthetic polypeptide
NDAVA

SEQ ID NO: 1288 - protein, 5 aa, synthetic construct
  REGION 1..5: note = Synthetic polypeptide
DYVMY

SEQ ID NO: 1289 - protein, 10 aa, synthetic construct
  REGION 1..10: note = Synthetic polypeptide
AINDHGTKTR

SEQ ID NO: 1290 - protein, 10 aa, synthetic construct
  REGION 1..10: note = Synthetic polypeptide
AINDHGDRTK

SEQ ID NO: 1291 - protein, 10 aa, synthetic construct
  REGION 1..10: note = Synthetic polypeptide
AINNHGTKTR

SEQ ID NO: 1292 - protein, 10 aa, synthetic construct
  REGION 1..10: note = Synthetic polypeptide
AIRDYGDRTR

SEQ ID NO: 1293 - protein, 10 aa, synthetic construct
  REGION 1..10: note = Synthetic polypeptide
AISRSGGSTD

SEQ ID NO: 1294 - protein, 10 aa, synthetic construct
  REGION 1..10: note = Synthetic polypeptide
AISRSGGSTN

SEQ ID NO: 1295 - protein, 10 aa, synthetic construct
  REGION 1..10: note = Synthetic polypeptide
AISRSGSSTN

SEQ ID NO: 1296 - protein, 10 aa, synthetic construct
  REGION 1..10: note = Synthetic polypeptide
AISWSGASTV

SEQ ID NO: 1297 - protein, 10 aa, synthetic construct
  REGION 1..10: note = Synthetic polypeptide
AISWSGDSTV

SEQ ID NO: 1298 - protein, 10 aa, synthetic construct
  REGION 1..10: note = Synthetic polypeptide
TISVSGSSTD

SEQ ID NO: 1299 - protein, 10 aa, synthetic construct
  REGION 1..10: note = Synthetic polypeptide
TISKSGSSTD

SEQ ID NO: 1300 - protein, 10 aa, synthetic construct
  REGION 1..10: note = Synthetic polypeptide
TISTSGSSTY

SEQ ID NO: 1301 - protein, 10 aa, synthetic construct
  REGION 1..10: note = Synthetic polypeptide
RISRSGNSTG

SEQ ID NO: 1302 - protein, 10 aa, synthetic construct
  REGION 1..10: note = Synthetic polypeptide
RISRSGDSTG

SEQ ID NO: 1303 - protein, 10 aa, synthetic construct
  REGION 1..10: note = Synthetic polypeptide
RISRSGDNTG

SEQ ID NO: 1304 - protein, 10 aa, synthetic construct
  REGION 1..10: note = Synthetic polypeptide
CINKSDGLTY

SEQ ID NO: 1305 - protein, 10 aa, synthetic construct
  REGION 1..10: note = Synthetic polypeptide
RITRLGNGPY

SEQ ID NO: 1306 - protein, 10 aa, synthetic construct
  REGION 1..10: note = Synthetic polypeptide
AISTSGSNTY

SEQ ID NO: 1307 - protein, 10 aa, synthetic construct
  REGION 1..10: note = Synthetic polypeptide
AISTSGGSTA

SEQ ID NO: 1308 - protein, 10 aa, synthetic construct
  REGION 1..10: note = Synthetic polypeptide
AISRSAGSTY

SEQ ID NO: 1309 - protein, 10 aa, synthetic construct
  REGION 1..10: note = Synthetic polypeptide
AISTSGGTTD

SEQ ID NO: 1310 - protein, 9 aa, synthetic construct
  REGION 1..9: note = Synthetic polypeptide
DINMVGITD

SEQ ID NO: 1311 - protein, 10 aa, synthetic construct
  REGION 1..10: note = Synthetic polypeptide
AIATNGGTTY

SEQ ID NO: 1312 - protein, 10 aa, synthetic construct
  REGION 1..10: note = Synthetic polypeptide
TLTRGGDDTY

SEQ ID NO: 1313 - protein, 10 aa, synthetic construct
  REGION 1..10: note = Synthetic polypeptide
SINASGVRTY

SEQ ID NO: 1314 - protein, 10 aa, synthetic construct
  REGION 1..10: note = Synthetic polypeptide
SIRWDGDSTY

SEQ ID NO: 1315 - protein, 9 aa, synthetic construct
  REGION 1..9: note = Synthetic polypeptide
VISRSGISN

SEQ ID NO: 1316 - protein, 9 aa, synthetic construct
  REGION 1..9: note = Synthetic polypeptide
VISWRNNTY

SEQ ID NO: 1317 - protein, 10 aa, synthetic construct
  REGION 1..10: note = Synthetic polypeptide
AINWSGDSTY

SEQ ID NO: 1318 - protein, 10 aa, synthetic construct
  REGION 1..10: note = Synthetic polypeptide
AISRSGSSTS

SEQ ID NO: 1319 - protein, 10 aa, synthetic construct
  REGION 1..10: note = Synthetic polypeptide
TISRSGSMPY

SEQ ID NO: 1320 - protein, 10 aa, synthetic construct
  REGION 1..10: note = Synthetic polypeptide
AVEWSSGSTF

SEQ ID NO: 1321 - protein, 10 aa, synthetic construct
  REGION 1..10: note = Synthetic polypeptide
TISRSGSSTF

SEQ ID NO: 1322 - protein, 10 aa, synthetic construct
  REGION 1..10: note = Synthetic polypeptide
AISENSSILY

SEQ ID NO: 1323 - protein, 10 aa, synthetic construct
  REGION 1..10: note = Synthetic polypeptide
YISRTGGSTK

SEQ ID NO: 1324 - protein, 10 aa, synthetic construct
  REGION 1..10: note = Synthetic polypeptide
TINWSSGATL

SEQ ID NO: 1325 - protein, 9 aa, synthetic construct
  REGION 1..9: note = Synthetic polypeptide
GIGSNNGTL

SEQ ID NO: 1326 - protein, 17 aa, synthetic construct
  REGION 1..17: note = Synthetic polypeptide
AINDHGTKTRYSDSVRG

SEQ ID NO: 1327 - protein, 17 aa, synthetic construct
  REGION 1..17: note = Synthetic polypeptide
AINDHGDRTKYLDSVRG

SEQ ID NO: 1328 - protein, 17 aa, synthetic construct
  REGION 1..17: note = Synthetic polypeptide
AINNHGTKTRYSDSVRG

SEQ ID NO: 1329 - protein, 17 aa, synthetic construct
  REGION 1..17: note = Synthetic polypeptide
AINDHGDRTKYTDSVRG

SEQ ID NO: 1330 - protein, 17 aa, synthetic construct
  REGION 1..17: note = Synthetic polypeptide
AINDHGDRTKYSDSVRG

SEQ ID NO: 1331 - protein, 17 aa, synthetic construct
  REGION 1..17: note = Synthetic polypeptide
AIRDYGDRTRYDDSVKG

SEQ ID NO: 1332 - protein, 17 aa, synthetic construct
  REGION 1..17: note = Synthetic polypeptide
AIRDYGDRTRYADSVKG

SEQ ID NO: 1333 - protein, 17 aa, synthetic construct
  REGION 1..17: note = Synthetic polypeptide
AISRSGGSTDYRDSVKG

SEQ ID NO: 1334 - protein, 17 aa, synthetic construct
  REGION 1..17: note = Synthetic polypeptide
AISRSGGSTNYRDSVKG

SEQ ID NO: 1335 - protein, 17 aa, synthetic construct
  REGION 1..17: note = Synthetic polypeptide
AISRSGSSTNYRDSVKG

SEQ ID NO: 1336 - protein, 17 aa, synthetic construct
  REGION 1..17: note = Synthetic polypeptide
AISWSGASTVYGDSVKG

SEQ ID NO: 1337 - protein, 17 aa, synthetic construct
  REGION 1..17: note = Synthetic polypeptide
AISWSGDSTVYGDSVKG

SEQ ID NO: 1338 - protein, 17 aa, synthetic construct
  REGION 1..17: note = Synthetic polypeptide
TISVSGSSTDYADSVKG

SEQ ID NO: 1339 - protein, 17 aa, synthetic construct
  REGION 1..17: note = Synthetic polypeptide
TISKSGSSTDYADSAKG

SEQ ID NO: 1340 - protein, 17 aa, synthetic construct
  REGION 1..17: note = Synthetic polypeptide
TISTSGSSTYYADSVKG

SEQ ID NO: 1341 - protein, 17 aa, synthetic construct
  REGION 1..17: note = Synthetic polypeptide
RISRSGNSTGYADSVKG

SEQ ID NO: 1342 - protein, 17 aa, synthetic construct
  REGION 1..17: note = Synthetic polypeptide
RISRSGDSTGYADSVKG

SEQ ID NO: 1343 - protein, 17 aa, synthetic construct
  REGION 1..17: note = Synthetic polypeptide
RISRSGDNTGYADSVKG

SEQ ID NO: 1344 - protein, 17 aa, synthetic construct
  REGION 1..17: note = Synthetic polypeptide
CINKSDGLTYYEDSVKG

SEQ ID NO: 1345 - protein, 17 aa, synthetic construct
  REGION 1..17: note = Synthetic polypeptide
RITRLGNGPYYSASVKG

SEQ ID NO: 1346 - protein, 17 aa, synthetic construct
  REGION 1..17: note = Synthetic polypeptide
AISTSGSNTYLADSLKA

SEQ ID NO: 1347 - protein, 17 aa, synthetic construct
  REGION 1..17: note = Synthetic polypeptide
AISTSGGSTAYADSVKG

SEQ ID NO: 1348 - protein, 17 aa, synthetic construct
  REGION 1..17: note = Synthetic polypeptide
AISRSAGSTYHVDSVKG

SEQ ID NO: 1349 - protein, 17 aa, synthetic construct
  REGION 1..17: note = Synthetic polypeptide
AISTSGGTTDYVDSVKG

SEQ ID NO: 1350 - protein, 16 aa, synthetic construct
  REGION 1..16: note = Synthetic polypeptide
DINMVGITDYSDPVKG

SEQ ID NO: 1351 - protein, 17 aa, synthetic construct
  REGION 1..17: note = Synthetic polypeptide
AIATNGGTTYYVDSVKG

SEQ ID NO: 1352 - protein, 17 aa, synthetic construct
  REGION 1..17: note = Synthetic polypeptide
TLTRGGDDTYCADSVKG

SEQ ID NO: 1353 - protein, 17 aa, synthetic construct
  REGION 1..17: note = Synthetic polypeptide
SINASGVRTYYVDALKG

SEQ ID NO: 1354 - protein, 17 aa, synthetic construct
  REGION 1..17: note = Synthetic polypeptide
SIRWDGDSTYYADSVKG

SEQ ID NO: 1355 - protein, 16 aa, synthetic construct
  REGION 1..16: note = Synthetic polypeptide
VISRSGISNYVDSVKG

SEQ ID NO: 1356 - protein, 16 aa, synthetic construct
  REGION 1..16: note = Synthetic polypeptide
VISWRNNTYYADSVKG

SEQ ID NO: 1357 - protein, 17 aa, synthetic construct
  REGION 1..17: note = Synthetic polypeptide
AINWSGDSTYYSDSMKG

SEQ ID NO: 1358 - protein, 17 aa, synthetic construct
  REGION 1..17: note = Synthetic polypeptide
AISRSGSSTSYADSVKG

SEQ ID NO: 1359 - protein, 17 aa, synthetic construct
  REGION 1..17: note = Synthetic polypeptide
TISRSGSMPYYADSVKG

SEQ ID NO: 1360 - protein, 17 aa, synthetic construct
  REGION 1..17: note = Synthetic polypeptide
AVEWSSGSTFYTDSVKG

SEQ ID NO: 1361 - protein, 17 aa, synthetic construct
  REGION 1..17: note = Synthetic polypeptide
TISRSGSSTFYAESVKG

SEQ ID NO: 1362 - protein, 17 aa, synthetic construct
  REGION 1..17: note = Synthetic polypeptide
AISENSSILYYTASVKG

SEQ ID NO: 1363 - protein, 17 aa, synthetic construct
  REGION 1..17: note = Synthetic polypeptide
YISRTGGSTKYENSVKG

SEQ ID NO: 1364 - protein, 17 aa, synthetic construct
  REGION 1..17: note = Synthetic polypeptide
TINWSSGATLTADSVKG

SEQ ID NO: 1365 - protein, 16 aa, synthetic construct
  REGION 1..16: note = Synthetic polypeptide
GIGSNNGTLTADSVKG

SEQ ID NO: 1366 - protein, 16 aa, synthetic construct
  REGION 1..16: note = Synthetic polypeptide
GPLVDYLETVPVVYTY

SEQ ID NO: 1367 - protein, 16 aa, synthetic construct
  REGION 1..16: note = Synthetic polypeptide
GPLVDYLETTPLVYTY

SEQ ID NO: 1368 - protein, 16 aa, synthetic construct
  REGION 1..16: note = Synthetic polypeptide
GPLNDYLEVTPLVYTY

SEQ ID NO: 1369 - protein, 18 aa, synthetic construct
  REGION 1..18: note = Synthetic polypeptide
RLTFSTTTAYTGELQYPY

SEQ ID NO: 1370 - protein, 18 aa, synthetic construct
  REGION 1..18: note = Synthetic polypeptide
RLTFSTTTTYTGELQYPY

SEQ ID NO: 1371 - protein, 18 aa, synthetic construct
  REGION 1..18: note = Synthetic polypeptide
RLTFSTTDAYTGKLQYPY

SEQ ID NO: 1372 - protein, 16 aa, synthetic construct
  REGION 1..16: note = Synthetic polypeptide
DLDGRTWHGDDLEYDY

SEQ ID NO: 1373 - protein, 18 aa, synthetic construct
  REGION 1..18: note = Synthetic polypeptide
RLSFDNTALYTSANRYSY

SEQ ID NO: 1374 - protein, 18 aa, synthetic construct
  REGION 1..18: note = Synthetic polypeptide
RLSFDNTAFYTSAIRYSD

SEQ ID NO: 1375 - protein, 18 aa, synthetic construct
  REGION 1..18: note = Synthetic polypeptide
RLSFDNTAFYTSAIRYSY

SEQ ID NO: 1376 - protein, 15 aa, synthetic construct
  REGION 1..15: note = Synthetic polypeptide
TTSWLPGHNANVYDY

SEQ ID NO: 1377 - protein, 15 aa, synthetic construct
  REGION 1..15: note = Synthetic polypeptide
GTSWVPGHNANAYDY

SEQ ID NO: 1378 - protein, 13 aa, synthetic construct
  REGION 1..13: note = Synthetic polypeptide
AWECDYAPADFGS

SEQ ID NO: 1379 - protein, 19 aa, synthetic construct
  REGION 1..19: note = Synthetic polypeptide
GRTLASTHDTKTSPQTYDY

SEQ ID NO: 1380 - protein, 18 aa, synthetic construct
  REGION 1..18: note = Synthetic polypeptide
RLSFDDSAYYTSTLRYAY

SEQ ID NO: 1381 - protein, 18 aa, synthetic construct
  REGION 1..18: note = Synthetic polypeptide
RLSFSGSSYYQGPLQYPY

SEQ ID NO: 1382 - protein, 18 aa, synthetic construct
  REGION 1..18: note = Synthetic polypeptide
RLTFNLIDYYTAETRYTY

SEQ ID NO: 1383 - protein, 18 aa, synthetic construct
  REGION 1..18: note = Synthetic polypeptide
RLDFSSTDLYTTAPRYPY

SEQ ID NO: 1384 - protein, 18 aa, synthetic construct
  REGION 1..18: note = Synthetic polypeptide
GRPIGLYYPSPRIRDYND

SEQ ID NO: 1385 - protein, 17 aa, synthetic construct
  REGION 1..17: note = Synthetic polypeptide
RLSFGSGYYTNKLNYAY

SEQ ID NO: 1386 - protein, 17 aa, synthetic construct
  REGION 1..17: note = Synthetic polypeptide
RLAVLSSNTYCSGLWDY

SEQ ID NO: 1387 - protein, 12 aa, synthetic construct
  REGION 1..12: note = Synthetic polypeptide
VGQAPMYFGVDF

SEQ ID NO: 1388 - protein, 16 aa, synthetic construct
  REGION 1..16: note = Synthetic polypeptide
TVSSFDESKNPRWYPY

SEQ ID NO: 1389 - protein, 12 aa, synthetic construct
  REGION 1..12: note = Synthetic polypeptide
DVLLTFNKREDS

SEQ ID NO: 1390 - protein, 15 aa, synthetic construct
  REGION 1..15: note = Synthetic polypeptide
AGLGAVVAGMSDYDY

SEQ ID NO: 1391 - protein, 15 aa, synthetic construct
  REGION 1..15: note = Synthetic polypeptide
DASGYGSAWPDRYDY

SEQ ID NO: 1392 - protein, 14 aa, synthetic construct
  REGION 1..14: note = Synthetic polypeptide
APLVLKTTPGAYNY

SEQ ID NO: 1393 - protein, 14 aa, synthetic construct
  REGION 1..14: note = Synthetic polypeptide
NVLVTTTRLDQYDS

SEQ ID NO: 1394 - protein, 14 aa, synthetic construct
  REGION 1..14: note = Synthetic polypeptide
DHTGKLVFSKTSDY

SEQ ID NO: 1395 - protein, 14 aa, synthetic construct
  REGION 1..14: note = Synthetic polypeptide
RPLVPSEDPDNYNY

SEQ ID NO: 1396 - protein, 14 aa, synthetic construct
  REGION 1..14: note = Synthetic polypeptide
YGSTTIRTTTRPTK

SEQ ID NO: 1397 - protein, 14 aa, synthetic construct
  REGION 1..14: note = Synthetic polypeptide
HYNGVYQDSQSYDY

SEQ ID NO: 1398 - protein, 14 aa, synthetic construct
  REGION 1..14: note = Synthetic polypeptide
GATGVFRIARAYSY

SEQ ID NO: 1399 - protein, 13 aa, synthetic construct
  REGION 1..13: note = Synthetic polypeptide
GPTFFRIARAYPY

SEQ ID NO: 1400 - protein, 125 aa, synthetic construct
  REGION 1..125: note = Synthetic polypeptide
QVQLQESGGGLVRPGGSLRLSCVGSGSTFRHHAMAWFRQTTGKEREFVSAINDHGTKTRYSDSVRGRFTISRDNDENMVYLQMDNLRPEDTAVYSCAAGPLVDYLETVPVVYTYWGQGTQVTVSS

SEQ ID NO: 1401 - protein, 125 aa, synthetic construct
  REGION 1..125: note = Synthetic polypeptide
QVQLQESGGGLVQPGGSLRLSCAASGSTFRHHAMAWFRQTPGKEREFVSAINDHGDRTKYLDSVRGRFTISRDNTDNMVYLLMSDLRPEDTAVYSCAAGPLVDYLETTPLVYTYWGQGTQVTVSS

SEQ ID NO: 1402 - protein, 125 aa, synthetic construct
  REGION 1..125: note = Synthetic polypeptide
QVQLQESGGGLVQPGGSLRLSCVGSGSTFRHHAMAWFRQTAGKEREFVSAINNHGTKTRYSDSVRGRFTISRDNDENMVYLQMDNLRPEDTAVYSCAAGPLVDYLETVPVVYTYWGQGTQVTVSS

SEQ ID NO: 1403 - protein, 125 aa, synthetic construct
  REGION 1..125: note = Synthetic polypeptide
  SITE 40: note = X - Any naturally occurring amino acid
QVQLQESGGGLVQPGESLKLSCAGSGSTFRHHAMAWFRQXPGKEREFVSAINDHGDRTKYLDSVRGRFTISRDNTNNMVYLQMSDLRPEDTANYSCAAGPLVDYLETTPLVYTYWGQGTQVTVSS

SEQ ID NO: 1404 - protein, 125 aa, synthetic construct
  REGION 1..125: note = Synthetic polypeptide
QVQLQESGGGLVQPGGSLRISCAGSGSTFRHHAMAWFRQTAGKEREFVSAINDHGTKTRYSDSVRGRFTISRDNDENMVYLQMDNLRSEDTANYTCAAGPLVDYLETVPVVYTYWGQGTQVTVSS

SEQ ID NO: 1405 - protein, 125 aa, synthetic construct
  REGION 1..125: note = Synthetic polypeptide
QVQLQESGGGLVQPGGSLKLSCAGSGSTFRHHALAWFRQTAEKEREFVSAINDHGTKTRYSDSVRGRFTISRDNDGNMVYLQMDNLRPEDTAVYSCAAGPLVDYLETVPVVYTYWGQGTQVTVSS

SEQ ID NO: 1406 - protein, 125 aa, synthetic construct
  REGION 1..125: note = Synthetic polypeptide
QVQLQESGGGLVQAGGSLRLSCAASGSTFRHHAMAWFRQTPGKEREFVSAINDHGDRTKYLDSVRGRFTISRDNTDNMVYLQMSDLRTEDTAVYTCAAGPLVDYLETTPLVYTYWGQGTQVTVSS

SEQ ID NO: 1407 - protein, 125 aa, synthetic construct
  REGION 1..125: note = Synthetic polypeptide
QVQLQESGGGLVQPGGSLKLSCAASGSTFRHHAMAWFRQTPGKEREFVSAINDHGDRTKYLDSVRGRFTISRDNTDNMVYLQMSDLRPEDTAVYSCAAGPLVDYLETTPLVYTYWGQGTQVTVSS

SEQ ID NO: 1408 - protein, 125 aa, synthetic construct
  REGION 1..125: note = Synthetic polypeptide
QVQLQESGGGVVQPGGSLKLSCAASGSTFRHHAMAWFRQTPGKEREFVSAINDHGDRTKYLDSVRGRFTISRDDTDNMVYLQMSDLRTEDTAVYTCAAGPLVDYLETTPLVYTYWGQGTQVTVSS

SEQ ID NO: 1409 - protein, 125 aa, synthetic construct
  REGION 1..125: note = Synthetic polypeptide
QVQLQESGGGLVQPGGSLRLSCAGSGSTFRHHAMAWFRQTPGKEREFVSAINDHGDRTKYTDSVRGRFTISRDNTDNMVYLQMSDLRPEDTAVYSCAAGPLVDYLETTPLVYTYWGQGTQVTVSS

SEQ ID NO: 1410 - protein, 125 aa, synthetic construct
  REGION 1..125: note = Synthetic polypeptide
QVQLQESGGGLVQPGGSLKLSCTGSGSTFRHHAMAWFRQTPGKEREFVAAINDHGDRTKYLDSVRGRFTISRDNTDNMVYLQMSDLRPEDTANYSCAAGPLVDYLETTPLVYTYWGQGTQVTVSS

SEQ ID NO: 1411 - protein, 125 aa, synthetic construct
  REGION 1..125: note = Synthetic polypeptide
QVQLQESGGGLVQAGGSLRLSCAASGSTFRHHAMAWFRQTPGKGREFVSAINDHGDRTKYLDSVRGRFTISRDNTDNMVYLQMSDLRPEDTAVYSCAAGPLVDYLETTPLVYTYWGQGTQVTVSS

SEQ ID NO: 1412 - protein, 125 aa, synthetic construct
  REGION 1..125: note = Synthetic polypeptide
QVQLQESGGGLVQPGGSLKLSCAGSGSTFKHHAMAWFRHTPGKEREFVSAINDHGDRTKYSDSVRGRFTIARDNTDNMVYLQMDDLLPEDTANYTCAAGPLVDYLETTPLVYTYWGQGTQVTVSS

SEQ ID NO: 1413 - protein, 126 aa, synthetic construct
  REGION 1..126: note = Synthetic polypeptide
QVQLQESGGGLAQAGASLRLSCAGSGNNFEHYAVAWFRQDAPGKERDFVAAIRDYGDRTRYDDSVKGRFTISRDNAKSMVYLEMNNLKPKDAAVYYCAAGPLNDYLEVTPLVYTYWGQGTQVTVSS

SEQ ID NO: 1414 - protein, 126 aa, synthetic construct
  REGION 1..126: note = Synthetic polypeptide
QVQLQESGGGLAQAGASLRLSCAGSGNNFEHYAVAWFRQEAPGKERDFVAAIRDYGDRTRYADSVKGRFTISRDNAKSMVYLEMNNLKPEDTAVYYCTAGPLNDYLEVTPLVYTYWGQGTQVTVSS

SEQ ID NO: 1415 - protein, 127 aa, synthetic construct
  REGION 1..127: note = Synthetic polypeptide
QVQLQESGGGLVQAGDSLRLSCAASGDTFSMYAMGWFRQAPGKEREFVAAISRSGGSTDYRDSVKGRFTISRDNDLNAGYLQMNSLKPEDTAVYYCALRLTFSTTTAYTGELQYPYWGQGTQVTVSS

SEQ ID NO: 1416 - protein, 127 aa, synthetic construct
  REGION 1..127: note = Synthetic polypeptide
QVQLQESGGGLVQAGDSLRLSCAASGDTFSMYTMGWFRQAPGKEREFVAAISRSGGSTNYRDSVKGRFTISRDNDLNAGYLQMNSLKPEDTAVYYCALRLTFSTTTAYTGELQYPYWGQGTQVTVSS

SEQ ID NO: 1417 - protein, 127 aa, synthetic construct
  REGION 1..127: note = Synthetic polypeptide
QVQLQESGGGLVQAGDSLRLSCAASGDTFSMYAMGWFRQAPGKEREFVAAISRSGSSTNYRDSVKGRFTISRDNDLNAGYLQMNSLKPEDTAVYYCALRLTFSTTTTYTGELQYPYWGQGTQVTVSS

SEQ ID NO: 1418 - protein, 127 aa, synthetic construct
  REGION 1..127: note = Synthetic polypeptide
QVQLQESGGGLVQAGDSLRLSCAASGNTFSMYAMGWFRQAPGKEREFVAAISRSGGSTNYRDSVKGRFTISRDNDLNAGYLQMNNLKPEDTAVYYCALRLTFSTTDAYTGKLQYPYWGQGTQVTVSS

SEQ ID NO: 1419 - protein, 125 aa, synthetic construct
  REGION 1..125: note = Synthetic polypeptide
QVQLQESGGGTVQPGESLRLSCEVSTDTFSSLAMAWFRQATGKDREFVAAISWSGASTVYGDSVKGRFTMTRDHPKKMVYLQMDNLKPEDTAVYYCAGDLDGRTWHGDDLEYDYWGQGTQVTVSS

SEQ ID NO: 1420 - protein, 125 aa, synthetic construct
  REGION 1..125: note = Synthetic polypeptide
QVQLQESGGGLVQPGGSLRLSCEVSTDTFSSLAMAWFRQATGKEREFVAAISWSGASTVYGDSVKGRFTMTRDHPKKMVYLQMDNLKPEDTAVYYCAGDLDGRTWHGDDLEYDYWGQGTQVTVSS

SEQ ID NO: 1421 - protein, 125 aa, synthetic construct
  REGION 1..125: note = Synthetic polypeptide
QVQLQESGGGTVQPGESLRLSCEVSTDTFSSLAMAWFRQATAKDREFVAAISWSGDSTVYGDSVKGRFTMTRDHPKKMVYLQMDNLKPEDTAVYYCAGDLDGRTWHGDDLEYDYWGQGTQVTVSS

SEQ ID NO: 1422 - protein, 127 aa, synthetic construct
  REGION 1..127: note = Synthetic polypeptide
  SITE 36: note = X - Any naturally occurring amino acid
QVQLQESGGGSVQAGGSLRLSCAASGRTFSNYAMGXFRQTPGKEREFVATISVSGSSTDYADSVKGRFTISRDNAKKTVYLQINSLKTEDTAVYYCAARLSFDNTALYTSANRYSYWGQGTQVTVSS

SEQ ID NO: 1423 - protein, 127 aa, synthetic construct
  REGION 1..127: note = Synthetic polypeptide
QVQLQESGGGSVQAGGSLRLSCAASGRTFSDYAMGWFRQAPGKEREFVATISKSGSSTDYADSAKGRFTISRDNAKKTVYLQINSLKTEDTAVYYCAARLSFDNTAFYTSAIRYSDWGQGTQVTVSS

SEQ ID NO: 1424 - protein, 127 aa, synthetic construct
  REGION 1..127: note = Synthetic polypeptide
QVQLQESGGGSVQAGDSLRLSCAASGRTFSGYAMGWFRQAPGKEREFVATISTSGSSTYYADSVKGRFTISRDNAKKSVYLQINSLKTEDAAVYYCAARLSFDNTAFYTSAIRYSYWGQGTQVTVSS

SEQ ID NO: 1425 - protein, 124 aa, synthetic construct
  REGION 1..124: note = Synthetic polypeptide
QVQLQESGGGLVQAGGSLRLSCAASGRTFTGYAMGWFRQVPGLEREFVARISRSGNSTGYADSVKGRFTVSRDNAKSTMYLQMNSLKTEDTAVYYCAATTSWLPGHNANVYDYWGQGTQVTVSS

SEQ ID NO: 1426 - protein, 124 aa, synthetic construct
  REGION 1..124: note = Synthetic polypeptide
QVQLQESGGGSVQAGGSLRLSCAASGRTFSDYAMGWFRQVPGLEREFVARISRSGDSTGYADSVKGRFTVSRDNAKNTVYLQMNSLKTEDTAVYYCAATTSWLPGHNANVYDYWGQGTQVTVSS

SEQ ID NO: 1427 - protein, 124 aa, synthetic construct
  REGION 1..124: note = Synthetic polypeptide
QVQLQESGGGLVQAGGSLRLSCAASGLTFGRYAMGWFRQVPGLEREFIARISRSGDNTGYADSVKGRFTVSRDSAKSTVYLQMNSLKTEDTAVYYCAAGTSWVPGHNANAYDYWGQGTQVTVSS

SEQ ID NO: 1428 - protein, 122 aa, synthetic construct
  REGION 1..122: note = Synthetic polypeptide
QVQLQESGGGLVQAGDSLRLSCAPSGFTFDGYAIGWFRQAPGKEREKVACINKSDGLTYYEDSVKGRFTISSDTAKNTIHLQMNSLKPDDTAVYYCAAAWECDYAPADFGSWGQGTQVTVSS

SEQ ID NO: 1429 - protein, 122 aa, synthetic construct
  REGION 1..122: note = Synthetic polypeptide
QVQLQESGGGLVQAGGSLRLSCAPSGFTFDGYAIGWFRQAPGKEREKVACINKSDGLTYYEDSVKGRFTISSDTAKNTIHLQMNSLKPDDTAVYYCAAAWECDYAPADFGSWGQGTQVTVSS

SEQ ID NO: 1430 - protein, 128 aa, synthetic construct
  REGION 1..128: note = Synthetic polypeptide
QVQLQESGGGWVQPGDSLRLSCAASGFTFSDYAVGWFRQAPGKEREFVARITRLGNGPYYSASVKGRFTISRDNARDMAYLKMDALTPEDTATYYCAAGRTLASTHDTKTSPQTYDYWGLGTQVTVSS

SEQ ID NO: 1431 - protein, 128 aa, synthetic construct
  REGION 1..128: note = Synthetic polypeptide
QVQLQESGGGWVQPGDSLRLSCAASGSTFSDYAVGWFRQAPGKEREFVARITRLGNGPYYSASVKGRFTISRDNARDMAYLKMDALTPEDTATYYCAAGRTLASTHDTKTSPQTYDYWGQGTQVTVSS

SEQ ID NO: 1432 - protein, 127 aa, synthetic construct
  REGION 1..127: note = Synthetic polypeptide
QVQLQESGGGLVQAGGSRRLSCAASGRTFINYAMGWFRQAPGKEREFVAAISTSGSNTYLADSLKARFTISRDNAKNTVYLQIRSLNPEDTAVYYCAARLSFDDSAYYTSTLRYAYWGQGTQVTVSS

SEQ ID NO: 1433 - protein, 127 aa, synthetic construct
  REGION 1..127: note = Synthetic polypeptide
QVQLQESGGGLVQPGDSLTLSCADSGRTFSNYAMGWFHQAPGKEREFVAAISTSGGSTAYADSVKGRFTISRDNAKNTVYLQMNNLKPEDTAVYYCAARLSFSGSSYYQGPLQYPYWGQGTQVTVSS

SEQ ID NO: 1434 - protein, 127 aa, synthetic construct
  REGION 1..127: note = Synthetic polypeptide
QVQLQESGGGLVQPGGSLRLSCAASGDTFSNYAMGWFRQAPGKAREFVAAISRSAGSTYHVDSVKGRFTISRDNAMNTVYLQMNSLQPEDTAHYYCAARLTFNLIDYYTAETRYTYWGQGTQVTVSS

SEQ ID NO: 1435 - protein, 127 aa, synthetic construct
  REGION 1..127: note = Synthetic polypeptide
QVQLQESGGGLVQAGDSLRLSCTASERTFSNYAMGWFRLAPGKERKFVAAISTSGGTTDYVDSVKGRFTISRDNAKNTVYLQMNSLKPEDTAVYYCAARLDFSSTDLYTTAPRYPYWGQGTQVTVSS

SEQ ID NO: 1436 - protein, 126 aa, synthetic construct
  REGION 1..126: note = Synthetic polypeptide
QVQLQESGGGLVQPGGSVRLSCAASVFTLNNFIMSWVRQAPGKGLERVSDINMVGITDYSDPVKGRFTISRDNKQNTVYLQGNTLKPEDTAVYFCAAGRPIGLYYPSPRIRDYNDWGQGTQVTVSS

SEQ ID NO: 1437 - protein, 126 aa, synthetic construct
  REGION 1..126: note = Synthetic polypeptide
QVQLQESGGGLVQAGDSLKLSCAASGRTFSTYAMGWFRQAPGKERDVVAAIATNGGTTYYVDSVKGRFTISRDNAQNRVYLQMNSLKPEDTAIYYCAARLSFGSGYYTNKLNYAYWGQGTQVTVSS

SEQ ID NO: 1438 - protein, 126 aa, synthetic construct
  REGION 1..126: note = Synthetic polypeptide
QVQLQESGGGLVQAGNSLKLSCAASGRNLAYYVMGWFRQAPGREREPVATLTRGGDDTYCADSVKGRFTISSDNAKNTVYLQMNNLKPEDTAIYTCAARLAVLSSNTYCSGLWDYWGQGTQVTVSS

SEQ ID NO: 1439 - protein, 121 aa, synthetic construct
  REGION 1..121: note = Synthetic polypeptide
QVQLQESGGGLVQPGGSLTLSCGASGFDFSDYVMYWLRQAPGKGLQWVSSINASGVRTYYVDALKGRFTISRDNAKNTLYLQIDDLKPEDTGLYYCARVGQAPMYFGVDFWGNGTQVTVSS

SEQ ID NO: 1440 - protein, 125 aa, synthetic construct
  REGION 1..125: note = Synthetic polypeptide
QVQLQESGGGLVQTGGSLRVSCAASGRSISNYNMGWFRQPPGKEREIVGSIRWDGDSTYYADSVKGRFTISRDNTKNTVYLQMNSLKSEDTADYYCAATVSSFDESKNPRWYPYWGQGTQVTVSS

SEQ ID NO: 1441 - protein, 120 aa, synthetic construct
  REGION 1..120: note = Synthetic polypeptide
QVQLQESGGGLVQPGGSLRLSCAASGRIFSINAMGWYRQAPGKQRELVAVISRSGISNYVDSVKGRFTISRDNAKNTVYLQMNSLNPEDTADYYCNADVLLTFNKREDSWGQGTQVTVSS

SEQ ID NO: 1442 - protein, 123 aa, synthetic construct
  REGION 1..123: note = Synthetic polypeptide
QVQLQESGGGLVQAGGSLKLSCAASGRTFSSYAMGWFRQAPGKERDFVAVISWRNNTYYADSVKGRFTISRDNAKNTVHLQMNSLKSEDTAVYYCAAAGLGAVVAGMSDYDYWGQGTQVTVSS

SEQ ID NO: 1443 - protein, 124 aa, synthetic construct
  REGION 1..124: note = Synthetic polypeptide
QVQLQESGGGSVQAGDSLTLSCIASGRTFSSLAMGWFRQAPGKEREFVAAINWSGDSTYYSDSMKGRLTMSRDNAKNTVFLQMNSLEPEDTAVYVCAADASGYGSAWPDRYDYWGQGTQVTVSS

SEQ ID NO: 1444 - protein, 123 aa, synthetic construct
  REGION 1..123: note = Synthetic polypeptide
QVQLQESGGGLVQAGGSLRLSCAASERTFTNYAMGWFRQGPGKDRAFVAAISRSGSSTSYADSVKGRFTISRDNAENILYLQMNSLKPEDTAVYYCAAAPLVLKTTPGAYNYWGQGTQVTVSS

SEQ ID NO: 1445 - protein, 123 aa, synthetic construct
  REGION 1..123: note = Synthetic polypeptide
QVQLQESGGGLVQAGGSLRLSCAASGRTFTNYAMGWFRQAPGKEREFVATISRSGSMPYYADSVKGRFTISRDNAKNMVYLQMNSLKPEDTAVYYCAANVLVTTTRLDQYDSWGQGTQVTVSS

SEQ ID NO: 1446 - protein, 123 aa, synthetic construct
  REGION 1..123: note = Synthetic polypeptide
QVQLQESGGGLVQAGGSLRLSCAVSGRTFSSYAMGWFRQARGKEREFVAAVEWSSGSTFYTDSVKGRFAISRDIAKNTVYLQMNSLKPEDTAVYYCAGDHTGKLVFSKTSDYWGQGTQVTVSS

SEQ ID NO: 1447 - protein, 123 aa, synthetic construct
  REGION 1..123: note = Synthetic polypeptide
QVQLQESGGGLVQPGDSLRLSCTASERTFTNYAMAWFRQAPGKERDVLATISRSGSSTFYAESVKGRFTISRDNTKNTVYLQMNSLEPEDTAVYYCAARPLVPSEDPDNYNYWGQGTQVTVSS

SEQ ID NO: 1448 - protein, 123 aa, synthetic construct
  REGION 1..123: note = Synthetic polypeptide
QVQLQESGGGLVQAGGSLRLSCAASGRIFSNSAMGWFRQVLGKEREFVAAISENSSILYYTASVKGRFTISRDNDKNTVYLQMTSLKAEDTAVYYCAGYGSTTIRTTTRPTKWGQGTQVTVSS

SEQ ID NO: 1449 - protein, 123 aa, synthetic construct
  REGION 1..123: note = Synthetic polypeptide
  SITE 115: note = X - Any naturally occurring amino acid.
QVQLQESGGGLVQAGDSLRLSCVASGRTLSNYGMGWFRQAPGKGREFVAYISRTGGSTKYENSVKGRFIISRDTAKNTIYLQMNSLQGEDTAVYYCAFHYNGVYQDSQSYDYWGXGTQVTVSS

SEQ ID NO: 1450 - protein, 123 aa, synthetic construct
  REGION 1..123: note = Synthetic polypeptide
QVQLQESGGGSVQAGDSLRLSCVAPGREISSPAMGWFRQAPGKEREFVATINWSSGATLTADSVKGRFTIFKDVEKNTVYLQMNSLRPEDTAVYSCAAGATGVFRIARAYSYWGQGTQVTVSS

SEQ ID NO: 1451 - protein, 121 aa, synthetic construct
  REGION 1..121: note = Synthetic polypeptide
  SITE 39: note = X - Any naturally occurring amino acid.
QVQLQESGGGLMQAGDSLRLSCTVSGRDFANDAVAWFRXPPGKEREFVVGIGSNNGTLTADSVKGRSTIWRDNIKNTVYLQMSRLTPDDTAVYYCASGPTFFRIARAYPYWGQGTQVTVSS

SEQ ID NO: 1452 - protein, 125 aa, synthetic construct
  REGION 1..125: note = Synthetic polypeptide
QVQLQESGGGLVQPGESLKLSCAGSGSTFRHHAMAWFRQTPGKEREFVSAINDHGDRTKYLDSVRGRFTISRDNTNNMVYLQMSDLRPEDTANYSCAAGPLVDYLETTPLVYTYWGQGTQVTVSS

SEQ ID NO: 1453 - protein, 127 aa, synthetic construct
  REGION 1..127: note = Synthetic polypeptide
QVQLQESGGGSVQAGGSLRLSCAASGRTFSNYAMGWFRQTPGKEREFVATISVSGSSTDYADSVKGRFTISRDNAKKTVYLQINSLKTEDTAVYYCAARLSFDNTALYTSANRYSYWGQGTQVTVSS

SEQ ID NO: 1454 - protein, 123 aa, synthetic construct
  REGION 1..123: note = Synthetic polypeptide
QVQLQESGGGLVQAGDSLRLSCVASGRTLSNYGMGWFRQAPGKGREFVAYISRTGGSTKYENSVKGRFIISRDTAKNTIYLQMNSLQGEDTAVYYCAFHYNGVYQDSQSYDYWGQGTQVTVSS

SEQ ID NO: 1455 - protein, 121 aa, synthetic construct
  REGION 1..121: note = Synthetic polypeptide
QVQLQESGGGLMQAGDSLRLSCTVSGRDFANDAVAWFRQPPGKEREFVVGIGSNNGTLTADSVKGRSTIWRDNIKNTVYLQMSRLTPDDTAVYYCASGPTFFRIARAYPYWGQGTQVTVSS

SEQ ID NO: 1456 - protein, 114 aa, synthetic construct
  REGION 1..114: note = Synthetic polypeptide.
MRLLILALLGICSLTAYIVEGVGSEVSDKRTCVSLTTQRLPVSRIKTYTITEGSLRAVIFITKRGLKVCADPQATWVRDVVRSMDRKSNTRNNMIQTKPTGTQQSTNTAVTLTG

SEQ ID NO: 1457 - protein, 4 aa, synthetic construct
  REGION 1..4: note = Synthetic polypeptide.
CPPC

SEQ ID NO: 1458 - protein, 9 aa, synthetic construct
  REGION 1..9: note = Synthetic polypeptide.
DKTHTCPPC

SEQ ID NO: 1459 - protein, 14 aa, synthetic construct
  REGION 1..14: note = Synthetic polypeptide.
EPKSCDKTHTCPPC

SEQ ID NO: 1460 - protein, 14 aa, synthetic construct
  REGION 1..14: note = Synthetic polypeptide.
EPKSSDKTHTCPPC

SEQ ID NO: 1461 - protein, 227 aa, synthetic construct
  REGION 1..227: note = Synthetic polypeptide.
DKTHTCPPCPAPEAAGGPSVFLFPPKPKDTLMISRTPEVTCVVVDVSHEDPEVKFNWYVDGVEVHNAKTKPREEQYNSTYRVVSVLTVLHQDWLNGKEYKCKVSNKALPAPIEKTISKAKGQPREPQVYTLPPSRDELTKNQVSLTCLVKGFYPSDIAVEWESNGQPENNYKTTPPVLDSDGSFFLTSKLTVDKSRWQQGNVFSCSVMHEALHNHYTQKSLSLSPGK

SEQ ID NO: 1462 - protein, 227 aa, synthetic construct
  REGION 1..227: note = Synthetic polypeptide.
DKTHTCPPCPAPEAAGGPSVFLFPPKPKDTLMISRTPEVTCVVVDVSHEDPEVKFNWYVDGVEVHNAKTKPREEQYNSTYRVVSVLTVLHQDWLNGKEYKCKVSNKALPAPIEKTISKAKGQPREPQVYTLPPSRDELTKNQVSLYCLVKGFYPSDIAVEWESNGQPENNYKTTPPVLDSDGSFFLYSKLTVDKSRWQQGNVFSCSVMHEALHNHYTQKSLSLSPGK

SEQ ID NO: 1463 - protein, 227 aa, synthetic construct
  REGION 1..227: note = Synthetic polypeptide.
DKTHTCPPCPAPEAAGGPSVFLFPPKPKDTLMISRTPEVTCVVVDVSHEDPEVKFNWYVDGVEVHNAKTKPREEQYNSTYRVVSVLTVLHQDWLNGKEYKCKVSNKALPAPIEKTISKAKGQPREPQVCTLPPSRDELTKNQVSLSCAVKGFYPSDIAVEWESNGQPENNYKTTPPVLDSDGSFFLVSKLTVDKSRWQQGNVFSCSVMHEALHNHYTQKSLSLSPGK

SEQ ID NO: 1464 - protein, 227 aa, synthetic construct
  REGION 1..227: note = Synthetic polypeptide.
DKTHTCPPCPAPEAAGGPSVFLFPPKPKDTLMISRTPEVTCVVVDVSHEDPEVKFNWYVDGVEVHNAKTKPREEQYNSTYRVVSVLTVLHQDWLNGKEYKCKVSNKALPAPIEKTISKAKGQPREPQVYTLPPCRDELTKNQVSLWCLVKGFYPSDIAVEWESNGQPENNYKTTPPVLDSDGSFFLYSKLTVDKSRWQQGNVFSCSVMHEALHNHYTQKSLSLSPGK

SEQ ID NO: 1465 - protein, 414 aa, synthetic construct
  REGION 1..414: note = Synthetic polypeptide
QVQLQESGGGSVQAGDSLRLSCAASGRTFSGYAMGWFRQAPGKEREFVATISTSGSSTYYADSVKGRFTISRDNAKKSVYLQINSLKTEDAAVYYCAARLSFDNTAFYTSAIRYSYWGQGTQVTVSSGGSGGSGGSGGSGGSGGSGGSGGSGGSGGSGGSGGSGGSGGSGGSGGSGGSGGSGGSGGSDKTHTCPPCPAPEAAGGPSVFLFPPKPKDTLMISRTPEVTCVVVDVSHEDPEVKFNWYVDGVEVHNAKTKPREEQYNSTYRVVSVLTVLHQDWLNGKEYKCQVSNKALPAPIEKTISKAKGQPREPQVCTLPPSRDELTKNQVSLSCAVKGFYPSDIAVEWESNGQPENNYKTTPPVLDSDGSFFLVSKLTVDKSRWQQGNVFSCSVMHEALHNHYTQKSLSLSPGK

SEQ ID NO: 1466 - protein, 452 aa, synthetic construct
  REGION 1..452: note = Synthetic polypeptide
DKTHTCPPCPAPEAAGGPSVFLFPPKPKDTLMISRTPEVTCVVVDVSHEDPEVKFNWYVDGVEVHNAKTKPREEQYNSTYRVVSVLTVLHQDWLNGKEYKCQVSNKALPAPIEKTISKAKGQPREPQVYTLPPCRDELTKNQVSLWCLVKGFYPSDIAVEWESNGQPENNYKTTPPVLDSDGSFFLYSKLTVDKSRWQQGNVFSCSVMHEALHNHYTQKSLSLSPGKGGSGGSGGSGGSGGSGGSGGSGGSGGSGGSGGSGGSGGSGGSGGSGGSGGSGGSGGSGGSCDLPQTHSLGSRRTLMLLAQMRKISLFSCLKDRHDFGFPQEEFGNQFQKAETIPVLHEMIQQIFNLFSTKDSSAAWDETLLDKFYTELYQQLNDLEACVIQGVGVEETPLMKEDSILAVRKYFQRITLYLKEKKYSPCAWEVVRAEIMASFSLSTNLQESLRSKE

SEQ ID NO: 1467 - protein, 414 aa, synthetic construct; identical to SEQ ID NO: 1465
  REGION 1..414: note = Synthetic polypeptide

SEQ ID NO: 1468 - protein, 411 aa, synthetic construct
  REGION 1..411: note = Synthetic polypeptide
QVQLQESGGGLVHPGGSLRLSCAASGRSFSSYFMGWFRQAPGKEREFVAGIGWNDGSINYADSVKGRFTISRDNAKNTGYLQMNSLKPEDTAVYYCAASVSLYGLEKSSAYTSWGQGTQVTVSSGGSGGSGGSGGSGGSGGSGGSGGSGGSGGSGGSGGSGGSGGSGGSGGSGGSGGSGGSGGSDKTHTCPPCPAPEAAGGPSVFLFPPKPKDTLMISRTPEVTCVVVDVSHEDPEVKFNWYVDGVEVHNAKTKPREEQYNSTYRVVSVLTVLHQDWLNGKEYKCQVSNKALPAPIEKTISKAKGQPREPQVCTLPPSRDELTKNQVSLSCAVKGFYPSDIAVEWESNGQPENNYKTTPPVLDSDGSFFLVSKLTVDKSRWQQGNVFSCSVMHEALHNHYTQKSLSLSPGK

SEQ ID NO: 1469 - protein, 452 aa, synthetic construct; identical to SEQ ID NO: 1466
  REGION 1..452: note = Synthetic polypeptide

SEQ ID NO: 1470 - protein, 632 aa, synthetic construct
  REGION 1..632: note = Synthetic polypeptide
QVQLQESGGGLVQPGGSLRLSCAASGSIFSINVMGWYRQTPGKERELVAKITNFGITSYADSAQGRFTISRGNAKNTVYLQMNSLKPEDTAVYYCNLDTTGWGPPPYQYWGQGTQVTVSSGGSGGSGGSGGSGGSGGSGGSGGSGGSGGSGGSGGSGGSGGSGGSGGSGGSGGSGGSGGSDKTHTCPPCPAPEAAGGPSVFLFPPKPKDTLMISRTPEVTCVVVDVSHEDPEVKFNWYVDGVEVHNAKTKPREEQYNSTYRVVSVLTVLHQDWLNGKEYKCQVSNKALPAPIEKTISKAKGQPREPQVYTLPPCRDELTKNQVSLWCLVKGFYPSDIAVEWESNGQPENNYKTTPPVLDSDGSFFLYSKLTVDKSRWQQGNVFSCSVMHEALHNHYTQKSLSLSPGKGGSGGSGGSGGSGGSGGSGGSGGSGGSGGSGGSGGSGGSGGSGGSGGSGGSGGSGGSGGSCDLPQTHSLGSRRTLMLLAQMRKISLFSCLKDRHDFGFPQEEFGNQFQKAETIPVLHEMIQQIFNLFSTKDSSAAWDETLLDKFYTELYQQLNDLEACVIQGVGVEETPLMKEDSILAVRKYFQRITLYLKEKKYSPCAWEVVRAEIMASFSLSTNLQESLRSKE

SEQ ID NO: 1471 - protein, 414 aa, synthetic construct; identical to SEQ ID NO: 1465
  REGION 1..414: note = Synthetic polypeptide

SEQ ID NO: 1472 - protein, 452 aa, synthetic construct; identical to SEQ ID NO: 1466
  REGION 1..452: note = Synthetic polypeptide

SEQ ID NO: 1473 - protein, 452 aa, synthetic construct
  REGION 1..452: note = Synthetic polypeptide
DKTHTCPPCPAPEAAGGPSVFLFPPKPKDTLMISRTPEVTCVVVDVSHEDPEVKFNWYVDGVEVHNAKTKPREEQYNSTYRVVSVLTVLHQDWLNGKEYKCQVSNKALPAPIEKTISKAKGQPREPQVYTLPPCRDELTKNQVSLWCLVKGFYPSDIAVEWESNGQPENNYKTTPPVLDSDGSFFLYSKLTVDKSRWQQGNVFSCSVMHEALHNHYTQKSLSLSPGKGGSGGSGGSGGSGGSGGSGGSGGSGGSGGSGGSGGSGGSGGSGGSGGSGGSGGSGGSGGSCDLPQTHSLGSRRTLMLLAQMRKISLFSCLKDRHDFGFPQEEFGNQFQKAETIPVLHEMIQQIFNLFSTKDSSAAWDETLLDKFYTELYQQLNDLEACVIQGVGVEETPLMKEDSILAVRKYFQRITLYLKEKKYSPCAWEVVRAEIMRSFSLSTNLQESLRSKE
